(19) United States
(12) Patent Application Publication
(10) Pub. No.: US 2024/0050491 A1
(43) Pub. Date: Feb. 15, 2024

(54) ANTIMICROBIAL AGENTS DERIVED FROM BACILLUS

(71) Applicant: The state of Israel, Ministry of Agriculture & Rural Development, Agricultural Research Organization, Rishon-LeZion (IL)

(72) Inventors: Moshe SHEMESH, ModiIn (IL); Yulia KROUPITSKI, Ness Ziona (IL); Shlomo SELA, ModiIn (IL)

(73) Assignee: The state of Israel, Ministry of Agriculture & Rural Development, Agricultural Research Organization, Rishon-LeZion (IL)

(21) Appl. No.: 18/368,040

(22) Filed: Sep. 14, 2023

Related U.S. Application Data
(63) Continuation of application No. PCT/IL2022/050289, filed on Mar. 14, 2022.
(60) Provisional application No. 63/160,829, filed on Mar. 14, 2021.
(60) Provisional application No. 63/184,264, filed on May 5, 2021.

(51) Int. Cl. A61K 35/742; A01N 3/00; A61P 31/04; A01N 63/22; C12N 1/20; A23L 3/3463; A23L 3/3571; A23B 7/155

(52) U.S. Cl. CPC A61K 35/742; A01N 3/00; A61P 31/04; A01N 63/22; C12N 1/20; A23L 3/34635; A23L 3/3571; A23B 7/155

(57) ABSTRACT

A method of generating an antimicrobial agent is disclosed. The method comprises:

(a) culturing Bacillus cells in a medium under conditions effective to allow secretion of at least one antimicrobial agent into the medium; and

(b) purifying the at least one antimicrobial agent from the medium to generate a purified preparation comprising the at least one antimicrobial agent.

Uses of the antimicrobial agents secreted from the Bacillus cells are also disclosed.

### RELATED APPLICATIONS

[0001] This application is a Continuation of PCT Patent Application No. PCT/IL2022/050289 having International filing date of Mar. 14, 2022, which claims the benefit of priority under 35 USC § 119(e) of U.S. Provisional Patent Application Nos. 63/160,829 filed on Mar. 14, 2021 and 63/184,264 filed on May 5, 2021. The contents of the above applications are all incorporated by reference as if fully set forth herein in their entirety.

### SEQUENCE LISTING STATEMENT

[0002] The XML file, entitled 97829 SequenceListing.xml, created on Sep. 12, 2023, comprising 8,393,361 bytes, submitted concurrently with the filing of this application is incorporated herein by reference.

### FIELD AND BACKGROUND OF THE INVENTION

[0003] The present invention, in some embodiments thereof, relates to antimicrobial agents derived from Bacillus species and, more particularly, but not exclusively, to antibacterial agents derived from Bacillus subtilis.

[0004] Non-typhoidal Salmonella enterica serovars are of major public health concern, leading to approximately 93.8 million cases of gastroenteritis and 155,000 deaths each year. In the United States and worldwide, Salmonella is the leading bacterial pathogen responsible for food-borne outbreaks. Efforts to control Salmonella in food include improved hygienic methods, vaccination, probiotics, prebiotics and use of antimicrobial agents. However, the rise of multidrug antibiotic 30 resistance has increased pressure to reduce the use of a wide range antimicrobial agents, including antibiotics in the food production. Since, outbreaks of Salmonellosis due to egg or meat contamination still occur, it is of high priority to develop efficient means to interfere with the pathogen's transmission through the production chain.

[0005] Bacillus subtilis represents a potentially biocontrol bacterium against pathogenic species such as Salmonella enterica. Beside their spore-forming ability, Bacillus species are capable of surviving stressful environments due to their capacity to produce complex communities of multicellular cells e.g. biofilms. Cells in biofilms are bound together by extracellular polymorphic substances (EPS) and form complex structures, capable of resisting environmental stresses including antimicrobial agents. Thus, biofilm formation represents a strategy for persistence under unfavorable conditions in diverse environments, such as competition among different microorganisms.

[0006] Consumption of sprouts is increasing in the world as they are a good source of various nutrients that include proteins, carbohydrates, minerals, and Sprout seeds are germinated under warm and humid conditions that are ideal and optimal for bacterial proliferation. The germination step is the main source of contamination in sprouts as bacteria present in the seeds may become internalized during the sprouting. These bacteria include human pathogens bacteria such as Salmonella enterica and E. coli. Sprouts are usually consumed in the raw form in western countries so that the nutrients and other components that confer health benefits are not lost. Hence, there is a high risk involved in sprout consumption because in most cases there are no steps taken before consumption to eliminate the pathogenic bacteria that may be present. In recent decades, foodborne disease outbreaks due to the consumption of sprouts have occurred worldwide. The bacterial pathogens responsible for these outbreaks are largely Salmonella spp. and pathogenic Escherichia coli strains O157:H7 and 0104. Foodborne illness caused by raw sprout consumptions is mainly associated with alfalfa sprouts, likely because alfalfa is among the most widely available crops. The contamination of sprouts has become a worldwide food safety concern. The focus on prevention based strategies becomes very important. Intervention methods aimed at reducing or eliminating bacterial populations following pre-harvest and post-harvest contamination in sprouts have been studied. These methods include physical, biological, as well as chemical interventions.

[0007] These methods have been explored to reduce foodborne pathogens on sprouts and seeds, although their effectiveness has been suboptimal.

[0008] Chlorine is the most commonly used sanitizing agent for treatment of fresh produce products in the United States. The U.S. Food and Drug Administration (FDA) recommends sanitizing seeds with 20,000 ppm active chlorine, as calcium hypochlorite (Ca(OCl)₂), for 15 min, and to monitor the bacteria count in spent irrigation water as a means to control risk of foodborne illness associated with sprouts. Some promising results have been reported for chlorine treatment in eliminating pathogens on sprouts and their seeds with no significant negative impact on seed germination capacity. However, most studies have reported that chlorine is ineffective in the complete eradication of pathogens from vegetable surfaces, particularly if the initial bacterial load is high. The average microbial reduction by chlorine treatment was reported to be about 2.5 log CFU/g, which is much lower than the 5-log reduction recommended by the National Advisory Committee on Microbiological Criteria for Foods.

[0009] The strategies for food bio-preservation are generally based on the use of antagonistic microorganisms, antimicrobial metabolites, and bacteriophages. Nonpathogenic microorganisms that can compete with pathogens for physical space and nutrients have been applied to reduce foodborne pathogens in food products.

[0010] Over the last decades, applications using members of the Bacillus subtilis group have emerged in both food processes and crop protection industries. The B. subtilis group offers an abundance of antagonistic compounds displaying a broad range of biological functions. This huge versatility increases the industrial and environmental interest of B. subtilis strains, especially when considering their range of action against foodborne or phytopathogenic flora as well as their history of safe use in food.

[0011] Background art includes Shemesh and Chai, J Bacteriol. 2013 June; 195(12): 2747-2754. Borriss, R. 2011 Use of plant-associated Bacillus strains as biofertilizers and biocontrol agents, In: Maheshwari DK (ed). Bacteria in agrobiology: plant growth responses. Springer. Germany, pp 41-76; Dhouib, H., Zouari, I., Abdallah, D. B., Belbahri, L, Taktak, W, Triki, M. A., & Tounsi. S. 2019. Potential of a novel endophytic Bacillus velezensis in tomato growth promotion and protection against Verticillin wilt disease. Biological Control, 139, 104092; and Fan B, Wang C, Song X, Ding X, Wu L, Wu H, Gao X, Borriss R. 2018. Bacillus velezensis FZB42 in 2018: The gram-positive model strain for plant growth promotion and biocontrol. Front Microbiol 9:1-14.

### SUMMARY OF THE INVENTION

[0012] According to an aspect of the present invention there is provided a method of generating an antimicrobial agent comprising:
[0013] (a) culturing Bacillus cells of the species subtilis or velezensis in a medium under conditions effective to allow secretion of at least one antimicrobial agent into the medium; and
[0014] (b) purifying said at least one antimicrobial agent from the medium to generate a purified preparation comprising said at least one antimicrobial agent, thereby generating the antimicrobial agent.

[0015] According to an aspect of the present invention there is provided a composition of matter comprising at least one antimicrobial agent generated according to the method described herein.

[0016] According to an aspect of the present invention there is provided a composition of matter comprising at least one antimicrobial agent secreted from a Bacillus bacteria of the species subtilis or velezensis, wherein said at least one antimicrobial agent is more than 1% of the Bacillus components in the composition of matter.

[0017] According to an aspect of the present invention there is provided a method of treating an infection in a subject in need thereof, the method comprising administering to the subject a therapeutically effective amount of the composition of matter described herein, thereby treating the infection.

[0018] According to an aspect of the present invention there is provided a solid support coated with at least one antimicrobial agent generated according to the method described herein or the composition described herein.

[0019] According to an aspect of the present invention there is provided a method of killing a microbe, the method comprising contacting the microbe with at least one antimicrobial agent generated according to the method described herein or the composition described herein, thereby killing the microbe.

[0020] According to an aspect of the present invention there is provided a bacterial culture comprising Bacillus bacteria of the species subtilis or velezensis and a heterologous plant which promotes antimicrobial activity of said Bacillus bacteria.

[0021] According to an aspect of the present invention there is provided a conditioned medium of Bacillus bacteria having a 16S rRNA sequence as set forth in SEQ ID NO: 1 or 3.

[0022] According to an aspect of the present invention there is provided an article of manufacture comprising Bacillus bacteria having a 16S rRNA sequence as set forth in SEQ ID NO: 1 or 3 and an agriculturally acceptable carrier.

[0023] According to an aspect of the present invention there is provided a method for prolonging the shelf life of a plant or the post-harvest quality of a plant, or a combination thereof comprising post-harvest contacting said plant with an effective amount of Bacillus bacteria of the species subtilis or velezensis, thereby prolonging the shelf life of a plant or the post-harvest quality of a plant, or a combination thereof.

[0024] According to an aspect of the present invention there is provided a method for prolonging the shelf life of a plant, the post-harvest quality of a plant, increasing a plant performance parameter, or a combination thereof comprising pre-harvest contacting said plant with an effective amount of Bacillus bacteria having a 16S rRNA sequence as set forth in SEQ ID NOs: 1 or 3, thereby prolonging the shelf life of a plant, the post-harvest quality of a plant, or a combination thereof.

[0025] According to an aspect of the present invention there is provided a method of preserving a food product comprising contacting the food with a Bacillus bacteria of the species Subtilis or Velezensis or an agent derived from said Bacillus bacteria under conditions that down-regulate an activity and/or an amount of at least one type of microbe that is capable of spoiling the food product, thereby preserving the food product.

[0026] According to embodiments of the present invention, the at least one antimicrobial agent comprises more than 20% of the total Bacillus components in the preparation.

[0027] According to embodiments of the present invention, the method further comprises testing the activity of the antimicrobial agent.

[0028] According to embodiments of the present invention, the Bacillus cells are of the species subtilis.

[0029] According to embodiments of the present invention, the conditions support generation of a biofilm of said Bacillus subtilis cells.

[0030] According to embodiments of the present invention, the conditions enhance secretion of a pigment secreted from said Bacillus subtilis cells.

[0031] According to embodiments of the present invention, the purifying is effected by size exclusion.

[0032] According to embodiments of the present invention, the purifying is effected using reverse phase column chromatography.

[0033] According to embodiments of the present invention, the antimicrobial agent is an antibacterial agent.

[0034] According to embodiments of the present invention, the antibacterial agent is bactericidal towards at least one Gram positive bacteria.

[0035] According to embodiments of the present invention, the antibacterial agent is bactericidal towards at least one Gram negative bacteria.

[0036] According to embodiments of the present invention, the antibacterial agent is bactericidal towards at least one of the bacteria selected from the group consisting of E. coli, Salmonella Enterica, Staphylococcus aureus, Staphylococcus epidermidis and Bacillus cereus.

[0037] According to embodiments of the present invention, the Bacillus velezensis has a 16S rRNA sequence as set forth in SEQ ID NO: 1.

[0038] According to embodiments of the present invention, the composition further comprises a pharmaceutically acceptable carrier.

[0039] According to embodiments of the present invention, the infection is a bacterial infection.

[0040] According to embodiments of the present invention, the bacterial infection is selected from the group consisting of an E. coli infection, a Salmonella Enterica infection, a Staphylococcus aureus infection, a Staphylococcus epidermidis infection and a Bacillus cereus infection.

[0041] According to embodiments of the present invention, the contacting is effected in vivo.

[0042] According to embodiments of the present invention, the contacting is effected ex vivo.

[0043] According to embodiments of the present invention, the microbe comprises a bacteria.

[0044] According to embodiments of the present invention, the microbe is present on a plant or in the vicinity thereof.

[0045] According to embodiments of the present invention, the plant is a sprout.

[0046] According to embodiments of the present invention, the sprout is a seedling.

[0047] According to embodiments of the present invention, the sprout is a Medicago sativa sprout or a Vigna radiate sprout.

[0048] According to embodiments of the present invention, the bacteria of the bacterial culture has a 16S rRNA sequence as set forth in SEQ ID NO: 1.

[0049] According to embodiments of the present invention, the bacterial culture According to embodiments of the present invention, the further comprises an agriculturally acceptable carrier.

[0050] According to embodiments of the present invention, more than 90% of the bacteria of the bacterial culture is the Bacillus bacteria.

[0051] According to embodiments of the present invention, the agriculturally acceptable carrier comprises at least one agent selected from the group consisting of a stabilizer, a tackifier, a preservative, a carrier, a surfactant, an anticomplex agent and a combination thereof.

[0052] According to embodiments of the present invention, the bacterial culture is lyophilized.

[0053] According to embodiments of the present invention, the article of manufacture further comprises an agent which promotes the growth of a plant.

[0054] According to embodiments of the present invention, the agent which promotes the growth of the plant is selected from the group consisting of a fertilizer, an acaricide, a heribicide, a fungicide, an insecticide, a nematicide, a pesticide, a plant growth regulator, a rodenticide and a nutrient.

[0055] According to embodiments of the present invention, the plant is a crop plant.

[0056] According to embodiments of the present invention, the crop plant is a cultivated crop plant.

[0057] According to embodiments of the present invention, the plant is a monocot.

[0058] According to embodiments of the present invention, the plant is a dicot.

[0059] According to embodiments of the present invention, the Bacillus bacteria has a 16S rRNA sequence as set forth in SEQ ID NO: 1.

[0060] According to embodiments of the present invention, the Bacillus bacteria are formulated in a composition selected from the group consisting of: a dip, a spray, a seed coating and a concentrate.

[0061] According to embodiments of the present invention, the plant is at: a post-blossom stage, a blossom stage, a pre-blossom stage, or any combination thereof.

[0062] According to embodiments of the present invention, the contacting is contacting in the vicinity of or onto: a root, a stem, a trunk, a seed, a fruit, a flower, a leaf, or any combination thereof.

[0063] According to embodiments of the present invention, the food product is a fruit or vegetable.

[0064] According to embodiments of the present invention, the Bacillus bacteria has a 16S rRNA sequence as set forth in SEQ ID NO: 1 or 3.

[0065] According to embodiments of the present invention, the method further comprises contacting the plant with chlorine.

[0066] According to embodiments of the present invention, the method further comprises contacting the food with chlorine.

[0067] According to embodiments of the present invention, the microbe is a bacteria.

[0068] Unless otherwise defined, all technical and/or scientific terms used herein have the same meaning as commonly understood by one of ordinary skill in the art to which the invention pertains. Although methods and materials similar or equivalent to those described herein can be used in the practice or testing of embodiments of the invention, exemplary methods and/or materials are described below. In case of conflict, the patent specification, including definitions, will control. In addition, the materials, methods, and examples are illustrative only and are not intended to be necessarily limiting.

### BRIEF DESCRIPTION OF THE SEVERAL VIEWS OF THE DRAWINGS

[0069] The patent or application file contains at least one drawing executed in color. Copies of this patent or patent application publication with color drawing(s) will be provided by the Office upon request and payment of the necessary fee.

[0070] Some embodiments of the invention are herein described, by way of example only, with reference to the accompanying drawings. With specific reference now to the drawings in detail, it is stressed that the particulars shown are by way of example and for purposes of illustrative discussion of embodiments of the invention. In this regard, the description taken with the drawings makes apparent to those skilled in the art how embodiments of the invention may be practiced.

[0071] In the drawings:

[0072] FIGS. 1A-B are photographs of Bacillus subtilis 3610 colony morphology on LB plus 1% [vol/vol] glycerol and 0.1 mM MnSO₄ (LBGM), Liquid microbial growth medium (LB) and Nutrient Agar (NA) 72 hours (FIG. 1A) and Salmonella inhibition zone around Bacillus colony slab (FIG. 1B).

[0073] FIGS. 2A-B are photographs of Salmonella and Bacillus colonies cultured on LBGM (A) or LB (B) agar.

[0074] FIGS. 3A-B are photographs illustrating Bacillus colony formation on LBGM agar at 24, 48 and 72 hours (FIG. 3A) and the Salmonella inhibition zone around Bacillus colony slab (FIG. 3B).

[0075] FIGS. 4A-B are photographs illustrating colony morphology of 3610 wt and biofilm mutants on LBGM agar (FIG. 4A) and the Salmonella inhibition zone around Bacillus colony slab (FIG. 4B).

[0076] FIG. 5 is a photograph of the Staphylococcus aureus inhibition zone.

[0077] FIG. 6 is a photograph illustrating the anti-microbial activity of the brown and the black pigments derived from Bacillus subtilis in the plate model. Zone of inhibition (diameter in mm) was measured around the pigment well.

[0078] FIGS. 7A-B are graphs illustrating the antimicrobial effect of the purified pigment during growth of bacterial suspension. The tested pathogens at 10⁴ colony forming unit (CFU)/ml concentration were exposed to the purified pigment during their growth for 24 h at 25° C. The experiment was performed in triplicate.

[0079] FIGS. 8A-B: Salmonella numbers presented in log CFU/ml after 24 h, 48 h, and 72 h incubation in NB and boiled and filtrated sprout medium (BFSM). Salmonella was incubated in NB or BASF with or without Bacillus velezensis (strain BX77) cells at an initial concentration of 10² cells/ml. Initial concentration of Bacillus was either 10² CFU/ml (low load) or 10⁷ CFU/ml (high load). Black asterisks demonstrate total killing of Salmonella cells.

[0080] FIG. 9 is a photograph of the BFSA (boiled filtrated sprout agar) which becomes yellow/brown in the presence of Bacillus cells within 72 hours.

[0081] FIG. 10 is a graph presenting Salmonella numbers in log CFU/ml after 24 h in non-filtrated BFSA and BFSA filtrated from BX77. Salmonella was incubated in BFSA at an initial concentration of 10² CFU/ml or 10⁷ CFU/ml. Black asterisk showed total killing of Salmonella cells. This experiment was performed 4 times.

[0082] FIGS. 11A-B illustrate the antimicrobial activity of Bacillus cells against Salmonella on alfalfa roots. Red fluorescence of Salmonella cells and green fluorescence of Bacillus subtilis cells were visualized on alfalfa root by Confocal laser scanning microscopy. FIG. 11A demonstrates the colonization of the root with Salmonella, while FIG. 11B image shows an eradication of Salmonella in presence of Bacillus cells.

[0083] FIG. 12 is a photograph illustrating the inhibition of Salmonella (horizontal lines) by BX77 and B. subtilis 3610 (vertical lines) on LB (left panel) and plant extract agar BFSA (right panel). Inhibition zone is seen in the cross-section of the lines.

[0084] FIG. 13A is a graph illustrating the kinetics of Salmonella inactivation in conditioned-medium prepared from BX77 culture in Medicago sativa extract (also referred to as BFSA).

[0085] Salmonella (10⁴ CFU/ml) was added to a fresh, sterile plant's extract (SE; blue) or to a conditioned medium (CM; orange) prepared following the growth of BX77 in the plant's extract for 72 h at 25° C.

[0086] FIG. 13B is a graph illustrating the inhibition of Salmonella growth by conditioned-medium prepared from 72 h culture of strain BX77 in Medicago saliva extract (CM-BX77), or in Vigna radiate extract (MCM-BX77). Salmonella (10⁴ CFU/ml) was incubated in the plants extracts for 24 h at 25° C. BF, Medicago saliva extract; MBF, Vigna radiate extract.

[0087] FIGS. 14A-C are graphs and photographs illustrating the relationship between Bacillus BX77 growth, sporulation and generation of antimicrobial agents. BX77 was grown in plant extract (BF), or LB broth for 72 h at 25° C. Sporulation was assessed microscopically at different time points and is presented as percent sporulation relative to the entire Bacillus population (A). The activity of CM-samples, taken at the same time points, against Salmonella was determined by adding Salmonella (10⁴ CFU/ml) and incubating for another 24 h at 25° C. (B). A bright-field image of the cultures at 48 h is shown in FIG. 14C, indicating the high abundance of endospores (white dots) in the BF relative to the LB culture.

[0088] FIG. 15 is a photograph illustrating the antifungal activity of BX77. Fungi were grown on nutrient agar alone (top panel), or in the presence of Bacillus BX77 streaked as a line in the middle of each plate (Bottom panel). A, Aspergillus flavus; B, Fusarium proliferatum; C, Pencillium expansum.

[0089] FIG. 16 are photographs illustrating that Bacillus BX77 inhibits the colonization of Salmonella on 4-days old sprouted Medicago saliva seeds.

[0090] FIG. 17 is a graph illustrating the expression kinetics of Bacillus BX77 genes involved in the synthesis of known antimicrobial agents.

[0091] FIGS. 18A-B are graphs illustrating the influence of decontamination by Ca-hypochlorite, of Salmonella contaminated alfalfa seeds, on the concentration of Salmonella. The seeds were contaminated with Salmonella by dipping in 10²-109 CFU/ml. Decontamination was performed with 20,000 ppm Ca-hypochlorite. The number of Salmonella on the seeds (CFU/g seeds) was detected immediately after the contamination (A), and in the sprouts (B) after 3 days of sprouting (CFU/g sprouts). The results are representing the average and standard error of 3 independent experiments in duplicates. When bacteria were not detected, enrichment of the samples was performed in BPW. (*) Growth after enrichment. (−) No growth.

[0092] FIG. 19 is a graph illustrating Salmonella Typhimurium SL1344 survival in sprouts in the presence of BX-77 or absence of BX-77 after disinfection by Ca-hypochlorite of Salmonella contaminated seeds. Alfalfa seeds were contaminated by 10² or 10⁵ CFU of Salmonella, dried, decontaminated by Ca-hypochlorite and seeded in the presence or absence of BX-77. Salmonella infected seeds were used as controls in the absence or the presence of BX-77. The experiment was repeated twice and each set included 5 cups.

### DESCRIPTION OF SPECIFIC EMBODIMENTS OF THE INVENTION

[0093] The present invention, in some embodiments thereof, relates to antimicrobial agents derived from Bacillus species and, more particularly, but not exclusively, to antibacterial agents derived from Bacillus subtilis or Bacillus velezensis.

[0094] Before explaining at least one embodiment of the invention in detail, it is to be understood that the invention is not necessarily limited in its application to the details set forth in the following description or exemplified by the Examples. The invention is capable of other embodiments or of being practiced or carried out in various ways.

[0095] Bacillus subtilis and Bacillus velezensis represent potentially biocontrol bacteria against pathogenic species such as Salmonella. Beside their spore-forming ability, Bacillus species are capable of surviving stressful environments due to their capacity to produce complex communities of multicellular cells, such as biofilms. Cells in biofilms are bound together by extracellular polymorphic substances (EPS) and form complex structures, capable of resisting environmental stresses including antimicrobial agents. Thus, biofilm formation represents a strategy for persistence under unfavorable conditions in diverse environments, such as competition among different microorganisms.

[0096] A recent study demonstrated the ability of B. subtilis in production a dark brown pigment during biofilm formation in LBGM medium (Shemesh and Chai, J Bacteriol. 2013 June; 195(12): 2747-2754). It was noted that this pigment production was associated with the ability of B. subtilis to form a robust colony-type biofilm.

[0097] The present inventors hypothesized that the pigment produced by B. subtilis during biofilm formation may comprise antimicrobial properties enabling this bacterium to compete with different microbial species.

[0098] Whilst reducing the present invention to practice, the present inventors have shown that agents secreted from the biofilm generated from Bacillus subtilis were bactericidal towards a variety of bacteria including E. coli, Salmonella Enterica, Staphylococcus aureus, Staphylococcus epidermidis and Bacillus cereus, as summarized in Table 2 of the Examples section herein below.

[0099] Whilst further reducing the present invention to practice, the present inventors have shown that the Bacillus species (referred to herein as BX77) has very strong antimicrobial activities towards several bacteria and fungi (FIG. 15).

[0100] The present inventors propose that this bacteria may be useful at management of crops at both the pre—and post-harvest stage. More specifically, the present inventors envisage that secreted antimicrobials from these bacteria may be useful as a food bio-preservative.

[0101] Thus, according to a first aspect of the present invention, there is provided a method of generating an antimicrobial agent comprising:
[0102] (a) culturing Bacillus cells of the species subtilis or velezensis in a medium under conditions effective to allow secretion of at least one antimicrobial agent into the medium; and
[0103] (b) purifying the at least one antimicrobial agent from the medium to generate a purified preparation comprising the at least one antimicrobial agent, thereby generating the antimicrobial agent.

[0104] As used herein, the term “antimicrobial agent” refers to an agent having antimicrobial activity—i.e. the ability to suppress, control, inhibit or kill microorganisms, such as bacteria, fungi, viruses, protists and archae.

[0105] According to a particular embodiment, the antimicrobial agent is not an antifungal agent.

[0106] According to a specific embodiment, the antimicrobial agent is an antibacterial agent.

[0107] According to a specific embodiment, the antimicrobial agent is devoid of antiviral activity.

[0108] The antibacterial agent of this aspect of the present invention may comprise bactericidal and/or bacteriostatic towards at least one gram positive bacteria and/or one gram negative bacteria.

[0109] The term “Gram-positive bacteria” as used herein refers to bacteria characterized by having as part of their cell wall structure peptidoglycan as well as polysaccharides and/or teichoic acids and are characterized by their blue-violet color reaction in the Gram-staining procedure.

[0110] Representative Gram-positive bacteria include: Actinomyces spp., Bacillus anthracis, Bifidobacterium spp., Clostridium botulinum, Clostridium perfringens, Clostridium spp., Clostridium tetani, Corynebacterium diphtheriae, Corynebacterium jeikeium, Enterococcus faecalis, Enterococcus faecium, Erysipelothrix rhusiopathiae, Eubacterium spp., Gardnerella vaginalis, Gemella morbillorum, Leuconostoc spp., Mycobacterium abcessus, Mycobacterium avium complex, Mycobacterium chelonae, Mycobacterium fortuitum, Mycobacterium haemophilium, Mycobacterium kansasii, Mycobacterium leprae, Mycobacterium marinum, Mycobacterium scrofulaceum, Mycobacterium smegmatis, Mycobacterium terrae, Mycobacterium tuberculosis, Mycobacterium ulcerans, Nocardia spp., Peptococcus niger, Peptostreptococcus spp., Proprionibacterium spp., Staphylococcus aureus, Staphylococcus auricularis, Staphylococcus capitis, Staphylococcus cohnii, Staphylococcus epidermidis, Staphylococcus haemolyticus, Staphylococcus hominis, Staphylococcus lugdanensis, Staphylococcus saccharolyticus, Staphylococcus saprophyticus, Staphylococcus schleiferi, Staphylococcus similans, Staphylococcus warneri, Staphylococcus xylosus, Streptococcus agalactiae (group B streptococcus), Streptococcus anginosus, Streptococcus bovis, Streptococcus canis, Streptococcus equi, Streptococcus milleri, Streptococcus mitior, Streptococcus mutans, Streptococcus pneumoniae, Streptococcus pyogenes (group A streptococcus), Streptococcus salivarius, Streptococcus sanguis.

[0111] The term “Gram-negative bacteria” as used herein refer to bacteria characterized by the presence of a double membrane surrounding each bacterial cell. Representative Gram-negative bacteria include Acinetobacter calcoaceticus, Actinobacillus actinomycetemcomitans, Aeromonas hydrophila, Alcaligenes xylosoxidans, Bacteroides, Bacteroides fragilis, Bartonella bacilliformis, Bordetella spp., Borrelia burgdorferi, Branhamella catarrhalis, Brucella spp., Campylobacter spp., Chalmydia pneumoniae, Chlamydia psittaci, Chlamydia trachomatis, Chromobacterium violaceum, Citrobacter spp., Eikenella corrodens, Enterobacter aerogenes, Escherichia coli, Flavobacterium meningosepticum, Fusobacterium spp., Haemophilus influenzae, Haemophilus spp., Helicobacter pylori, Klebsiella spp., Legionella spp., Leptospira spp., Moraxella catarrhalis, Morganella morganii, Mycoplasma pneumoniae, Neisseria gonorrhoeae, Neisseria meningitidis, Pasteurella multocida, Plesiomonas shigelloides, Prevotella spp., Proteus spp., Providencia rettgeri, Pseudomonas aeruginosa, Pseudomonas spp., Rickettsia prowazekii, Rickettsia rickettsii, Rochalimaea spp., Salmonella spp., Salmonella typhi, Serratia marcescens, Shigella spp., Treponema carateum, Treponema pallidum, Treponema pallidum endemicum, Treponema pertenue, Veillonella spp., Vibrio cholerae, Vibrio vulnificus, Yersinia enterocolitica, Yersinia pestis.

[0112] According to particular embodiments, the agent of this aspect of the present invention comprises antibacterial activity against E. coli, Salmonella Enterica, Staphylococcus aureus, Staphylococcus epidermidis and Bacillus cereus.

[0113] According to another embodiment, the agent of this aspect of the present invention does not comprise antibacterial activity against a strain of Pseudomonas aeruginosa.

[0114] According to another embodiment, the agent of this aspect of the present invention has at least 1.5 times, 2 times and even 5 times greater antibacterial activity towards Staphylococcus aureus than towards Bacillus cereus, Salmonella Enterica, Pseudomonas aeruginosa or Enteropathogenic Escherichia coli, when measured in an identical assay under the same conditions.

[0115] As mentioned, in order to generate a purified preparation of the antimicrobial agent of this aspect of the present invention, the B. subtilis or B. velezensis bacteria are cultured in a medium under conditions effective to allow secretion of the antimicrobial agent into (or onto) the medium.

[0116] In one embodiment, the medium is a liquid medium (complex or minimal).

[0117] In another embodiment, the medium is a solid medium.

[0118] Exemplary strains of B. subtilis contemplated by the present invention include, but are not limited to B. subtilis NCIB 3610 (having a full genome sequence as set forth in SEQ ID NO: 2), Bacillus isolate BB124 (having a 16S rRNA sequence as set forth in SEQ ID NO: 3), B. subtilis MS1577 and 127185/2 (MS302; dairy isolate) and NCIB3610.

[0119] An exemplary strain of B. velezensis contemplated by the present invention include is BX77 (having a 16S rRNA sequence as set forth in SEQ ID NO: 1, and a full genome sequence as set forth in SEQ ID NO: 20).

[0120] Examples of growth substrates that can be used to culture Bacillus bacteria include but are not limited to MRS medium, LB medium, LBGS medium, TBS medium, yeast extract, soy peptone, casein peptone, milk and meat peptone.

[0121] Further examples of media are listed in Table 1 herein below.

TABLE 1
Abiotrophia media—Recipe for medium appropriate for growth of Abiotrophia genus
Acetamide Medium—Recipe for Acetamide medium.
Acetobacter Medium—Recipe for medium appropriate for the growth of Acetobacter genus.
Actinoplanes Medium—Media used to grow certain Actinoplanes species
Agrobacterium Agar Recipe—Agar appropriate for growth of Agrobacterium genus
Alicyclobacillus Agar—Recipe for Alicyclobacillus Agar.
Alicyclobacillus Medium—Recipe for Alicyclobacillus Medium.
Allantoin mineral agar—Recipe for the preparation of Allantoin minimal agar.
Allantoin mineral medium—Recipe for the preparation of Allantoin minimal medium.
Ashbya Full Medium—Recipe for the production of Ashbya full medium.
Azotobacter Agar—Agar appropriate for growth of Azobacter genus.
Bennett's Medium—media used for growth of some Actinoplanes species.
Bacillus agar—Agar used to grow some Bacillus species.
Bacillus broth—Agar used to grow some Bacillus species.
Bacillus schlegelii Medium—Medium appropriate for the growth of Bacillus schlegelii.
Bifidobacterium Medium—Recipe for Bifidobacterium medium.
Blue green algae agar—Recipe for blue green algae agar.
Blue green algae broth—Recipe for blue green algae broth.
Brain Heart Infusion Glucose Agar—Recipe for Brain Heart Infusion Glucose Agar.
Caulobacter Agar—Recipe for Caulobacter species
Caulobacter Medium—Recipe for Caulobacter spp.
Cantharellus Agar Recipe—Recipe for Cantharellus agar.
CASO agar—Recipe for CASO agar.
Clostridium thermocellum Medium—Recipe for medium appropriate for growth of
Clostridium thermocellum
Corynebacterium agar—Recipe for Corynebacterium agar.
Creatinine Medium—Recipe for the production of creatinine medium.
Czapek Agar (CZA)—Recipe for Czapek Agar (CZA).
Desulfovibrio Medium—Recipe for Desulfovibrio Medium.
Gluconobacter agar—Recipe for Gluconobacter agar.
Glucose Peptone Yeast Extract Agar (GPYA)—Recipe for Glucose Peptone Yeast Extract
Agar (GPYA).
Glucose Yeast Extract Agar—Recipe for Glucose Yeast Extract Agar.
Halobacterium agar—Recipe for the preparation of Halobacterium agar.
Halobacteria Medium—Recipe for Halobacteria Medium.
LB Agar—Recipe for the preparation of LB agar bacterial media.
LB broth—Recipe for the preparation of LB broth bacterial media.
LB broth (low salt)—Recipe for the preparation of low salt LB broth bacterial media.
Luminous Medium—Recipe for Luminous Medium.
M17 media—Recipe for the preparation of M17 media.
M9 minimal media—Minimal salts bacterial media.
Mannitol agar—Recipe for mannitol agar.
Mannitol broth—Recipe for mannitol broth.
Marine agar—Recipe for marine agar. Used for the growth of several marine bacteria.
Marine broth—Recipe for marine broth. Used for the growth of several marine bacteria.
Methylamine Salts Agar—Recipe for methylamine salts agar
Methylamine Salts Medium—Recipe for methylamine salts medium
Modified Chopped Meat Medium—Used for the growth of several anaerobic bacteria.
MY medium—Maltose yeast extract bacterial growth medium.
N4 Mineral Medium—Recipe for the production of N4 mineral medium.
Nitrosomonas europaea medium—Recipe for the production of Nitrosomonas europaea
medium.
Nutrient agar—Recipe for nutrient agar suitable for growth of many bacterial species.
Nutrient broth—Recipe for nutrient broth suitable for growth of many bacterial species.
MRS media—Recipe for MRS media. MRS media has been used for the recovery of lactic
acid bacteria (LAB) from various food products.
MS-Medium—Recipe for MS-medium.
N-Z amine agar with soluble starch and glucose—Agar used to grow some Actinomadura
species
NZCYM—NZ amine, NaCl, bacto-yeast extract, casamino acids, and magnesium sulfate.
NZM—NZ amine, NaCl, and magnesium sulfate.
NZYM—NZ amine, NaCl, bacto-yeast extract, and magnesium sulfate.
Oatmeal agar—agar used to grow some Actinomadura species.
Oenococcus Medium—Recipe for the preparation of Oenococcus medium.
Osmophilic Agar—Recipe for Osmophilic Agar.
Osmophilic Medium—Recipe for Osmophilic Medium.
Phenol red lactose broth—turns yellow when lactose is fermented.
Potato-Carrot Medium—agar used to grow some Actinoplanes species.
Propionibacterium Agar Recipe—Agar appropriate for the growth of Propionibacterium.
Propionibacterium Medium Recipe—Medium appropriate for the growth of
Propionibacterium.
PYS agar—agar used to grow some Actinomadura species.
R Medium—R Medium Recipe.
Rolled Oats Mineral Agar—Recipe for Rolled Oats Mineral Agar.
Saccharose agar—Recipe for the production of saccharose agar
Saccharose medium—Recipe for the production of saccharose medium
SOB media—Tryptone/yeast extract bacterial media.
SOC media—Tryptone/yeast extract bacterial media.
5% Sorbitol agar—Recipe for the production of 5% sorbitol agar.
5% Sorbitol medium—Recipe for the production of 5% sorbitol medium.
Sour Dough Medium—Recipe for the preparation of sour dough medium.
Starch-Mineral Salt (STMS) Agar—Recipe for starch-mineral salt (STMS) agar.
Styrene Mineral Salts Medium—Recipe for Styrene Mineral Salts medium.
Terrific broth—Recipe for the preparation of terrific broth bacterial media.
Thermus Agar—Recipe for agar appropriate for the growth of Therums genus
Thermus Medium—Recipe for media appropriate for the growth of Therums genus
Thiobacillus Medium F2—Recipe for the production of Thiobacillus medium F2
Tomato Juice Agar—Recipe for the preparation of tomato juice agar.
Tomato Juice Medium—Recipe for the preparation of tomato juice medium.
Tomato Juice Yeast Extract Agar—Recipe for the preparation of tomato juice yeast extract
agar.
Tomato Juice Yeast Extract Medium—Recipe for the preparation of tomato juice yeast extract
medium.
TSY agar—Trypticase soy yeast agar Recipe.
TSY broth—Trypticase soy yeast broth Recipe.
TYG Medium—Tryptone, yeast, glucose bacterial growth medium.
TYX Medium—Tryptone, yeast, xylose bacterial growth medium.
Urea Medium—Recipe for the preparation of urea medium
Uric Acid Medium—Recipe for the preparation of uric acid medium
Whey Agar—Recipe for the preparation of whey agar.
Whey Medium—Recipe for the preparation of whey medium.
Wickerham Salt Agar—Recipe for Wickerham Salt Agar.
Wickerham Salt Medium—Recipe for Wickerham Salt Medium.
Yeast Extract Glucose Medium—Yeast Extract Glucose medium recipe
YEL Agar—Recipe for YEL Agar.
YMF agar recipe—Recipe for preparation of YMF agar.
YMF medium recipe—Recipe for preparation of YMF medium.
YMG agar—Recipe for yeast and malt extract with glucose agar. This agar is used for a
number of Streptomyces species.
YMG media—Recipe for yeast and malt extract with glucose media. This media is used for a
number of Streptomyces species.
YPD Agar—Yeast extract/peptone/dextrose bacterial agar.
YPD media—Yeast extract/peptone/dextrose bacterial media.
YPG media—Yeast extract/peptone/galactose bacterial media.
YPM Agar—Recipe for YPM agar.
YPM Medium—Recipe for YPM medium.
YT (2x)—Yeast extract/tryptone bacterial media.

[0122] As mentioned, the Bacillus is cultured under conditions that allow for secretion of the antibacterial agent into the medium. In one embodiment, the conditions are such that allow for generation of a biofilm. The present inventors have uncovered particular components of a growth medium that are important for biofilm generation of bacteria being of the genus Bacillus (e.g. of the species B. subtilis). Thus, the present inventors propose that the medium used for culturing the B. subtilis comprises manganese. In another embodiment, the medium comprises glycerol. In still another embodiment, the medium comprises dextrose. In still another embodiment, the medium used for culturing comprises both manganese and dextrose.

[0123] In another embodiment, the growth medium is derived from plants. The present inventors have shown that culturing Bacilli bacteria in a plant derived medium promotes the secretion of antimicrobial agents.

[0124] In one embodiment, the plant from which the growth medium is derived is a young plant—for example a seedling or a sprout. Preferably, the plant has been grown from seed for no more than 3 days, 4 days, 5 days, 6 days 7 days or 10 days.

[0125] Exemplary plants which can be used to generate a growth medium include alfalfa sprouts (Medicago sativa) and Vigna radiate.

[0126] The plant extract may be prepared in any way known in the art. In one embodiment, the extract is a crude extract. The extract may undergo a process of sterilization and/or filtration.

[0127] The extract may be added to additional growth media in sufficient amounts such that the secretion of antimicrobial agents is enhanced.

[0128] Exemplary solid surfaces on which the culturing can be carried out include a wide range of substrates, ranging from various polymeric materials (silicone, polystyrene, polyurethane, and epoxy resins) to metals and metal oxides (silicon, titanium, aluminum, silica, and gold). Fabrication techniques (soft lithography and double casting molding techniques, microcontact printing, electron beam lithography, nanoimprint lithography, photolithography, electrodeposition methods, etc.) can be carried out on such materials in order to alter the topography of the solid surface.

[0129] Other conditions of the culture that may be altered to enhance generation of a biofilm include, but are not limited to environmental parameters such as pH, nutrient concentration, co-culture of additional bacteria and temperature.

[0130] In one embodiment, the culturing is carried out in a bioreactor.

[0131] As used herein, the term “bioreactor” refers to an apparatus adapted to support the biofilm of the invention.

[0132] The bioreactor will generally comprise one or more supports for the biofilm which may form a film thereover, and wherein the support is adapted to provide a significant surface area to enhance the formation of the biofilm. The bioreactors of the invention may be adapted for continuous throughput.

[0133] It will be appreciated that when the biofilm is generated in a bioreactor system, the conditions of the culture can be altered by altering the microfluidics (e.g. sheer stress) of the system.

[0134] As mentioned, agents or conditions are selected that bring about an advantageous change in a property of the biofilm such that the amount of the antimicrobial agent secreted into the medium is enhanced. In one embodiment, the property is the amount of biofilm. In one embodiment, the property is the thickness of biofilm. In another embodiment, the property is the density of the biofilm. In yet another embodiment, the property is the rate in which the biofilm is formed. In still another embodiment, the property is the amount of additional bacteria which is incorporated into the biofilm. In still another embodiment, the property is the resistance to temperature and/or pH.

[0135] In one embodiment, the pH of the growth substrate is higher than 6.

[0136] The culturing of this aspect of the present invention may be carried out in the presence of additional agents that serve to increase propagation of the B. subtilis bacteria and/or enhance biofilm formation. Such agents include for example acetoin.

[0137] The amount of acetoin and the timing of addition may be altered so as to promote optimal biofilm production. In one embodiment, about 0.01-5% acetoin is used. In another embodiment, about 0.01-4% acetoin is used. In another embodiment, about 0.01-3% acetoin is used. In another embodiment, about 0.01-2% acetoin is used. In another embodiment, about 0.01-1% acetoin is used. In another embodiment, about 0.01-0.5% acetoin is used.

[0138] Thus, the present inventors contemplate a culture comprising acetoin, a biofilm comprising Bacillus cells and a culture medium. In one embodiment, the culture medium is LB.

[0139] In one embodiment, about 0.05-5% acetoin is used. In another embodiment, about 0.05 4% acetoin is used. In another embodiment, about 0.05-3% acetoin is used. In another embodiment, about 0.05-2% acetoin is used. In another embodiment, about 0.05-1% acetoin is used. In another embodiment, about 0.05-0.5% acetoin is used.

[0140] In one embodiment, about 0.1-5% acetoin is used. In another embodiment, about 0.1-4% acetoin is used. In another embodiment, about 0.1-3% acetoin is used. In another embodiment, about 0.1-2% acetoin is used. In another embodiment, about 0.1-1% acetoin is used. In another embodiment, about 0.1-0.5% acetoin is used.

[0141] The cultures of this aspect of the present invention are propagated for a length of time sufficient to generate a biofilm which incorporates the B. subtilis.

[0142] In one embodiment, the conditions are selected such that the amount of biofilm produced by the B. subtilis or by the B. velezensis is enhanced and the amount of pigment secreted from the biofilm is enhanced. Alternatively, the conditions are selected such that the amount of pigment secreted by the B. subtilis is enhanced. Still alternatively, the conditions are selected such that the amount of antimicrobial secreted by the Bacillus velezensis is enhanced.

[0143] According to a particular embodiment, the color of the antimicrobial agent is a dark brown/reddish pigment.

[0144] Preferably, the B. subtilis or B. velezensis bacteria are cultured for at least 6 hours, 12 hours, 24 hours, 48 hours, 3 days, 4 days, 5 days, 6 days, 7 days, 8 days, 2 weeks, 3 weeks or longer to allow for sufficient quantities of the antimicrobial agent to be secreted.

[0145] In one embodiment, the B. subtilis or B. velezensis bacteria are cultured at a temperature between 20-40° C., more preferably between 23-32° C.—for example at about 30° C.

[0146] According to a particular embodiment, the B. subtilis bacteria are cultured in LBGM at about 30° C.

[0147] In one embodiment, the composition which is enriched in antimicrobial agents is a conditioned medium of a B. subtilis or B. velezensis culture.

[0148] Conditioned medium is the culture medium of a culture of B. subtilis or B. velezensis following a certain culturing period. The conditioned medium includes antimicrobial agents secreted by bacteria in the culture.

[0149] The culture medium can be any medium suitable for culturing the bacterial cells, as described herein above.

[0150] Following accumulation of adequate antimicrobial in the medium, the growth medium (i.e., conditioned medium) is separated from the bacterial cells and collected. It will be appreciated that the bacterial cells can be used repeatedly to condition further batches of medium over additional culture periods, provided that the cells retain their ability to condition the medium i.e. secrete antimicrobial agents.

[0151] Preferably, the conditioned medium is sterilized (e.g., filtration using a 0.2 μM filter) prior to use. The conditioned medium of some embodiments of the invention may be applied directly as an antimicrobial agent or extracted to concentrate the antimicrobial agents as further described herein above. For future use, conditioned medium is preferably stored frozen at 4° C., −20° C. or −80° C.

[0152] Additional steps may be taken to further purify the antimicrobial agents from the culture.

[0153] In one embodiment, a single antimicrobial agent is isolated from the culture.

[0154] In other embodiments, a plurality (for example 2-20 or 2-10) different antimicrobial agents are isolated from the culture.

[0155] In yet another embodiment, at least two, three, four, five or more antimicrobial agents are isolated from a single culture.

[0156] In yet another embodiment, an antimicrobial agent which comprises a color (i.e. a pigment) is isolated.

[0157] Preferably, the method for preparing the purified preparation which comprises the antimicrobial agent involves a step of removing the culture medium from the B. subtilis cells. This extracellular fraction of the liquid fermentation medium is also termed the supernatant and this fraction can be separated from the B. subtilis cellular fraction by e.g. centrifugation or filtration, or indeed by any other means available for obtaining a liquid fraction essentially without any bacterial cells present therein.

[0158] In particular embodiments of the invention, the purification comprises at least one size fractionation step. Preferably, this size fractionation step is performed on the extracellular fraction.

[0159] This size fractionation step may ensure that every component of the composition has a molecular weight of at least a given value. The size fractionation step may be any size fraction known to the skilled person, for example ultracentrifugation, ultrafiltration, microfiltration or gel-filtration.

[0160] Thus in a particular embodiment of the invention, the agent is purified from a liquid growth medium by a method involving one or more purification steps selected from the group consisting of ultracentrifugation, ultrafiltration, microfiltration and gel-filtration. Preferably, the purification step(s) are selected from the group consisting of ultrafiltration, microfiltration and ultracentrifugation, even more preferably from the group consisting of ultrafiltration and microfiltration.

[0161] Ultrafiltration is a membrane process where the membrane fractionates components of a liquid according to size. The membrane configuration is normally cross-flow wherein the liquid containing the relevant components are flowing across the membrane. Some of the liquid, containing components smaller than the nominal pore size of the membrane will permeate through the membrane. Molecules larger than the nominal pore size will be retained. The desired product may be in the retentate or the filtrate. If the ultrafiltration is performed in order to prepare a composition, wherein every agent within the composition has a molecular weight above a given value, the desired product is in the retentate. If a serial fractionation is made, the product may be in the retentate or filtrate.

[0162] Microfiltration is a membrane separation process similar to UF but with even larger membrane pore size allowing larger particles to pass through.

[0163] Gel filtration is a chromatographic technique in which particles are separated according to size. The filtration medium will typically be small gel beads which will take up the molecules that can pass through the bead pores. Larger molecules will pass through the column without being taken up by the beads.

[0164] Gel-filtration, ultrafiltration or microfiltration may for example be performed as described in R Hatti-Kaul and B Mattiasson (2001), Downstream Processing in Biotechnology, in Basic Biotechnology, eds C Ratledge and B Kristiansen, Cambridge University Press) pp 189.

[0165] In another embodiment the antimicrobial agent in the medium may be isolated by precipitation, such as precipitation with alcohol, such as ethanol and/or chromatographic methods. This may for example be performed essentially as described in WO2003/020944. It is also contemplated within the invention that the antimicrobial agents are isolated by sequentially performing two or more of above-mentioned methods. By way of example the antimicrobial agent may be isolated by first performing a size fractionation step followed by precipitation.

[0166] Other methods for isolating the antimicrobial agent of this aspect of the present invention are also contemplated by the present inventors including but not limited to HPLC.

[0167] Preferably more than 10% of the all the components of the purified preparation derived from the B. subtilis or B. velezensis bacteria comprises antimicrobial activity. Preferably, more than 20% of all the components of the purified preparation derived from the B. subtilis or B. velezensis bacteria comprises antimicrobial activity. In one embodiment, more than 30% of all the components of the purified preparation derived from the B. subtilis or B. velezensis bacteria comprises antimicrobial activity. In one embodiment, more than 40% of all the components of the purified preparation derived from the B. subtilis or B. velezensis bacteria comprises antimicrobial activity. In one embodiment, more than 50% of all the components of the purified preparation derived from the B. subtilis bacteria comprises antimicrobial activity.

[0168] Preferably more than 10% of the B. subtilis-derived components or B. velezensis-derived components of the purified preparation comprise antimicrobial activity. Preferably more than 20% of the B. subtilis-derived components or B. velezensis-derived components of the purified preparation comprise antimicrobial activity. In one embodiment, more than 30% of the B. subtilis-derived components or B. velezensis-derived components of the purified preparation comprise antimicrobial activity. In one embodiment, more than 40% of the B. subtilis-derived components or B. velezensis-derived components of the purified preparation comprise antimicrobial activity. In one embodiment, more than 50% of the B. subtilis-derived components or B. velezensis-derived components of the purified preparation comprise antimicrobial activity. Following isolation of the antimicrobial agent, the activity thereof may be tested.

[0169] In one embodiment, the at least one antimicrobial agent is between 1-100% of the B. subtilis or B. velezensis components in the composition of matter (per weight), between 5-100% of the B. subtilis or B. velezensis components in the composition of matter (per weight), between 10-100% of the B. subtilis or B. velezensis components in the composition of matter (per weight), between 15-100% of the B. subtilis or B. velezensis components in the composition of matter (per weight), between 20-100% of the B. subtilis or B. velezensis components in the composition of matter (per weight), between 25-100% of the B. subtilis or B. velezensis components in the composition of matter (per weight), between 30-100% of the B. subtilis or B. velezensis components in the composition of matter (per weight), between 35-100% of the B. subtilis or B. velezensis components in the composition of matter (per weight), between 40-100% of the B. subtilis or B. velezensis components in the composition of matter (per weight), between 45-100% of the B. subtilis or B. velezensis components in the composition of matter, between 50-100% of the B. subtilis or B. velezensis components in the composition of matter (per weight), between 55-100% of the B. subtilis or B. velezensis components in the composition of matter (per weight), between 60-100% of the B. subtilis or B. velezensis components in the composition of matter (per weight), between 65-100% of the B. subtilis or B. velezensis components in the composition of matter (per weight), or even between 70-100% of the B. subtilis or B. velezensis components in the composition of matter.

[0170] In vitro assays that can be used for confirming the antimicrobial activity of the purified fractions include, for example, the addition of varying concentrations of the antimicrobial composition to paper disks and placing the disks on agar containing a suspension of the pathogen of interest. Following incubation, clear inhibition zones develop around the discs that contain an effective concentration of the antimicrobial polypeptide (Liu et al. (1994) Plant Biology 91:1888-1892, herein incorporated by reference). Additionally, microspectrophotometrical analysis can be used to measure the in vitro antimicrobial properties of a composition (Hu et al. (1997) Plant Mol. Biol. 34:949-959 and Cammue et al. (1992) J. Biol. Chem. 267: 2228-2233, both of which are herein incorporated by reference). Assays that specifically measure antibacterial activity are also well known in the art. See, for example, Clinical and Laboratory Standards Institute, Guideline M7-A6, Methods for dilution antimicrobial susceptibility tests for bacteria that grow aerobically, herein incorporated by reference.

[0171] Since the agents of the present invention comprise anti-microbial properties they may be used to kill microbes.

[0172] Thus, according to another aspect of the present invention there is provided a method of killing a microbe, the method comprising contacting the microbe with the antimicrobial agents of the present invention.

[0173] As used herein the term “contacting” refers to the positioning of the agents of the present invention such that they are in direct or indirect contact with the bacterial cells. Thus, the present invention contemplates both applying the agents of the present invention to a desirable surface and/or directly to the bacterial cells.

[0174] Contacting surfaces with the agents described herein can be effected using any method known in the art including spraying, spreading, wetting, immersing, dipping, painting, ultrasonic welding, welding, bonding or adhering. The agents of the present invention may be attached to a solid surface as monolayers or multiple layers.

[0175] The present invention envisages coating a wide variety of surfaces with the agents of the present invention including fabrics, fibers, foams, films, concretes, masonries, glass, metals, plastics, polymers, and like.

[0176] An exemplary solid surface that may be coated with the agents of the present invention is an intracorporal or extra-corporeal medical device or implant.

[0177] An “implant” as used herein refers to any object intended for placement in a human body that is not a living tissue. The implant may be temporary or permanent. Implants include naturally derived objects that have been processed so that their living tissues have been devitalized. As an example, bone grafts can be processed so that their living cells are removed (acellularized), but so that their shape is retained to serve as a template for ingrowth of bone from a host. As another example, naturally occurring coral can be processed to yield hydroxyapatite preparations that can be applied to the body for certain orthopedic and dental therapies. An implant can also be an article comprising artificial components.

[0178] Thus, for example, the present invention therefore envisions coating vascular stents with the agents of the present invention. Another possible application of the agents of the present invention is the coating of surfaces found in the medical and dental environment.

[0179] Surfaces found in medical environments include the inner and outer aspects of various instruments and devices, whether disposable or intended for repeated uses. Examples include the entire spectrum of articles adapted for medical use, including scalpels, needles, scissors and other devices used in invasive surgical, therapeutic or diagnostic procedures; blood filters, implantable medical devices, including artificial blood vessels, catheters and other devices for the removal or delivery of fluids to patients, artificial hearts, artificial kidneys, orthopedic pins, plates and implants; catheters and other tubes (including urological and biliary tubes, endotracheal tubes, peripherally insertable central venous catheters, dialysis catheters, long term tunneled central venous catheters peripheral venous catheters, short term central venous catheters, arterial catheters, pulmonary catheters, Swan-Ganz catheters, urinary catheters, peritoneal catheters), urinary devices (including long term urinary devices, tissue bonding urinary devices, artificial urinary sphincters, urinary dilators), shunts (including ventricular or arterio-venous shunts); prostheses (including breast implants, penile prostheses, vascular grafting prostheses, aneurysm repair devices, heart valves, artificial joints, artificial larynxes, otological implants), anastomotic devices, vascular catheter ports, clamps, embolic devices, wound drain tubes, hydrocephalus shunts, pacemakers and implantable defibrillators, and the like. Other examples will be readily apparent to practitioners in these arts.

[0180] Surfaces found in the medical environment include also the inner and outer aspects of pieces of medical equipment, medical gear worn or carried by personnel in the health care setting. Such surfaces can include counter tops and fixtures in areas used for medical procedures or for preparing medical apparatus, tubes and canisters used in respiratory treatments, including the administration of oxygen, of solubilized drugs in nebulizers and of anesthetic agents. Also included are those surfaces intended as biological barriers to infectious organisms in medical settings, such as gloves, aprons and faceshields. Commonly used materials for biological barriers may be latex-based or non-latex based. Vinyl is commonly used as a material for non-latex surgical gloves. Other such surfaces can include handles and cables for medical or dental equipment not intended to be sterile.

[0181] Additionally, such surfaces can include those non-sterile external surfaces of tubes and other apparatus found in areas where blood or body fluids or other hazardous biomaterials are commonly encountered.

[0182] Other surfaces related to health include the inner and outer aspects of those articles involved in water purification, water storage and water delivery, and those articles involved in food processing. Thus the present invention envisions coating a solid surface of a food or beverage container to extend the shelf life of its contents.

[0183] Surfaces related to health can also include the inner and outer aspects of those household articles involved in providing for nutrition, sanitation or disease prevention. Examples can include food processing equipment for home use, materials for infant care, tampons and toilet bowls.

[0184] In addition, the agents of the present invention may have veterinary applications including disinfection of animal cages, coops or homes.

[0185] It will be appreciated that since the agents of the present invention have antimicrobial activity, the present invention contemplates use thereof for treating infection in a mammalian subject (e.g. humans).

[0186] Typically, the subjects who are treated are infected with pathogens which cause a disease.

[0187] As used herein, the term “pathogen” refers to a microbe or microorganism such as a virus, bacterium, prion or fungus that causes a disease (e.g. a respiratory disease).

[0188] According to a particular embodiment, the pathogen is a human pathogen.

[0189] Exemplary pathogenic viruses may belong to the following families: Adenoviridae, Coronaviridae, Picornaviridae, Herpesviridae, Hepadnaviridae, Flaviviridae, Retroviridae, Orthomyxoviridae, Paramyxoviridae, Papovaviridae, Polyomavirus, Rhabdoviridae, Togaviridae. Particular pathogenic viruses contemplated by the present invention are those that cause smallpox, influenza, mumps, measles, chickenpox, ebola, or rubella.

[0190] According to a particular embodiment, the virus is one which brings about a respiratory infection (e.g. an upper respiratory tract infection and/or a lower respiratory tract infection).

[0191] Thus, according to a particular embodiment, the pathogenic virus is an influenza virus (e.g. influenza virus A—(e.g. HIN1, H2N2, H3N2, H5N1, H7N7, H1N2, H9N2, H7N2, H7N3, H10N7 and H7N9), influenza virus B or influenza virus C).

[0192] In another embodiment, the pathogenic virus is a parainfluenza virus (hPIV) including the human parainfluenza virus type 1 (hPIV-1) (causes croup); the human parainfluenza virus type 2 (hPIV-2) (causes croup and other upper and lower respiratory tract illnesses), the human parainfluenza virus type 3 (hPIV-3) (associated with bronchiolitis and pneumonia) and the human parainfluenza virus type 4 (hPIV-4).

[0193] In yet another embodiment, the pathogenic virus is a respiratory syncytial virus (RSV).

[0194] In still another embodiment, the pathogenic virus is a coronavirus.

[0195] Exemplary pathogenic bacteria include Mycobacterium tuberculosis which causes tuberculosis, Streptococcus and Pseudomonas which cause pneumonia, and Shigella, Campylobacter and Salmonella which cause foodborne illnesses. Other exemplary pathogenic bacteria contemplated by the present invention are those that cause infections such as tetanus, typhoid fever, diphtheria, syphilis and Hansen's disease.

[0196] According to a particular embodiment, the pathogenic bacteria is E. coli, Klebsiella pneumonia, Enterococcus faecalis, Staphylococcus aureus (MSSA, MRSA), Salmonella Enteritidis or Serratia marcescens.

[0197] According to one embodiment, the infection is an acute infection.

[0198] According to another embodiment, the infection is a chronic infection.

[0199] According to one embodiment, the agents are used to treat a topical infection (i.e. infection of the skin) and are provided in a topical formulation.

[0200] According to another embodiment, the agents are used to treat an infection inside the body.

[0201] In this case, the agents may be provided ex vivo or in vivo.

[0202] Accordingly, the present invention contemplates contacting cells with the agents per se or as part of a pharmaceutical composition.

[0203] In one embodiment, the pharmaceutical compositions of the present invention are administered to a subject in need thereof in order to prevent or treat a bacterial infection.

[0204] As used herein, the term “subject in need thereof” refers to a mammal, preferably a human subject.

[0205] As used herein, the term “treating” refers to curing, reversing, attenuating, alleviating, minimizing, suppressing or halting the deleterious effects of a pathogen infection.

[0206] The phrase “pharmaceutical composition”, as used herein refers to a preparation of one or more of the active ingredients described herein with other chemical components such as physiologically suitable carriers and excipients. The purpose of a pharmaceutical composition is to facilitate administration of a compound to an organism.

[0207] As used herein the term “active ingredient” refers to the agents of the present invention accountable for the intended biological effect.

[0208] Hereinafter, the phrases “physiologically acceptable carrier” and “pharmaceutically acceptable carrier”, which may be used interchangeably, refer to a carrier or a diluent that does not cause significant irritation to an organism and does not abrogate the biological activity and properties of the administered compound. An adjuvant is included under these phrases.

[0209] Herein, the term “excipient” refers to an inert substance added to a pharmaceutical composition to further facilitate administration of an active ingredient. Examples, without limitation, of excipients include calcium carbonate, calcium phosphate, various sugars and types of starch, cellulose derivatives, gelatin, vegetable oils, and polyethylene glycols.

[0210] Techniques for formulation and administration of drugs may be found in the latest edition of “Remington's Pharmaceutical Sciences”, Mack Publishing Co., Easton, PA, which is herein fully incorporated by reference and are further described herein below.

[0211] It will be appreciated that the agents of the present invention can be provided to the individual with additional active agents to achieve an improved therapeutic effect as compared to treatment with each agent by itself.

[0212] Exemplary additional agents include antibiotics (e.g. rifampicin, chloramphenicol and spectinomycin), antibacterial peptides, antivirals, antifungals etc.

[0213] Pharmaceutical compositions of the present invention may be manufactured by processes well known in the art, e.g., by means of conventional mixing, dissolving, granulating, dragee-making, levigating, emulsifying, encapsulating, entrapping or lyophilizing processes.

[0214] Pharmaceutical compositions for use in accordance with the present invention may be formulated in conventional manner using one or more physiologically acceptable carriers comprising excipients and auxiliaries, which facilitate processing of the active ingredients into preparations which, can be used pharmaceutically. Proper formulation is dependent upon the route of administration chosen.

[0215] For injection, the active ingredients of the invention may be formulated in aqueous solutions, preferably in physiologically compatible buffers such as Hank's solution, Ringer's solution, or physiological salt buffer. For transmucosal administration, penetrants appropriate to the barrier to be permeated are used in the formulation. Such penetrants are generally known in the art.

[0216] For oral administration, the compounds can be formulated readily by combining the active compounds with pharmaceutically acceptable carriers well known in the art. Such carriers enable the compounds of the invention to be formulated as tablets, pills, dragees, capsules, liquids, gels, syrups, slurries, suspensions, and the like, for oral ingestion by a patient. Pharmacological preparations for oral use can be made using a solid excipient, optionally grinding the resulting mixture, and processing the mixture of granules, after adding suitable auxiliaries if desired, to obtain tablets or dragee cores. Suitable excipients are, in particular, fillers such as sugars, including lactose, sucrose, mannitol, or sorbitol; cellulose preparations such as, for example, maize starch, wheat starch, rice starch, potato starch, gelatin, gum tragacanth, methyl cellulose, hydroxypropylmethyl-cellulose, sodium carbomethylcellulose; and/or physiologically acceptable polymers such as polyvinylpyrrolidone (PVP). If desired, disintegrating agents may be added, such as cross-linked polyvinyl pyrrolidone, agar, or alginic acid or a salt thereof such as sodium alginate.

[0217] Dragee cores are provided with suitable coatings. For this purpose, concentrated sugar solutions may be used which may optionally contain gum arabic, talc, polyvinyl pyrrolidone, carbopol gel, polyethylene glycol, titanium dioxide, lacquer solutions and suitable organic solvents or solvent mixtures. Dyestuffs or pigments may be added to the tablets or dragee coatings for identification or to characterize different combinations of active compound doses.

[0218] Pharmaceutical compositions, which can be used orally, include push-fit capsules made of gelatin as well as soft, sealed capsules made of gelatin and a plasticizer, such as glycerol or sorbitol. The push-fit capsules may contain the active ingredients in admixture with filler such as lactose, binders such as starches, lubricants such as talc or magnesium stearate and, optionally, stabilizers. In soft capsules, the active ingredients may be dissolved or suspended in suitable liquids, such as fatty oils, liquid paraffin, or liquid polyethylene glycols. In addition, stabilizers may be added. All formulations for oral administration should be in dosages suitable for the chosen route of administration.

[0219] For buccal administration, the compositions may take the form of tablets or lozenges formulated in conventional manner.

[0220] For administration by nasal inhalation, the active ingredients for use according to the present invention are conveniently delivered in the form of an aerosol spray presentation from a pressurized pack or a nebulizer with the use of a suitable propellant, e.g., dichlorodifluoromethane, trichlorofluoromethane, dichloro-tetrafluoroethane or carbon dioxide. In the case of a pressurized aerosol, the dosage unit may be determined by providing a valve to deliver a metered amount.

[0221] Capsules and cartridges of, e.g., gelatin for use in a dispenser may be formulated containing a powder mix of the compound and a suitable powder base such as lactose or starch.

[0222] The preparations described herein may be formulated for parenteral administration, e.g., by bolus injection or continuous infusion. Formulations for injection may be presented in unit dosage form, e.g., in ampoules or in multidose containers with optionally, an added preservative.

[0223] The compositions may be suspensions, solutions or emulsions in oily or aqueous vehicles, and may contain formulatory agents such as suspending, stabilizing and/or dispersing agents.

[0224] Pharmaceutical compositions for parenteral administration include aqueous solutions of the active preparation in water-soluble form. Additionally, suspensions of the active ingredients may be prepared as appropriate oily or water based injection suspensions. Suitable lipophilic solvents or vehicles include fatty oils such as sesame oil, or synthetic fatty acids esters such as ethyl oleate, triglycerides or liposomes. Aqueous injection suspensions may contain substances, which increase the viscosity of the suspension, such as sodium carboxymethyl cellulose, sorbitol or dextran. Optionally, the suspension may also contain suitable stabilizers or agents which increase the solubility of the active ingredients to allow for the preparation of highly concentrated solutions.

[0225] Alternatively, the active ingredient may be in powder form for constitution with a suitable vehicle, e.g., sterile, pyrogen-free water based solution, before use.

[0226] The preparation of the present invention may also be formulated in rectal compositions such as suppositories or retention enemas, using, e.g., conventional suppository bases such as cocoa butter or other glycerides.

[0227] The preparation of the present invention may also be formulated as a topical compositions, such as a spray, a cream, a mouthwash, a wipe, a foam, a soap, an oil, a solution, a lotion, an ointment, a paste and a gel.

[0228] Pharmaceutical compositions suitable for use in context of the present invention include compositions wherein the active ingredients are contained in an amount effective to achieve the intended purpose. More specifically, a therapeutically effective amount means an amount of active ingredients effective to prevent, alleviate or ameliorate symptoms of disease or prolong the survival of the subject being treated.

[0229] Determination of a therapeutically effective amount is well within the capability of those skilled in the art.

[0230] For any preparation used in the methods of the invention, the therapeutically effective amount or dose can be estimated initially from in vitro assays. For example, a dose can be formulated in animal models and such information can be used to more accurately determine useful doses in humans.

[0231] Toxicity and therapeutic efficacy of the active ingredients described herein can be determined by standard pharmaceutical procedures in vitro, in cell cultures or experimental animals. The data obtained from these in vitro and cell culture assays and animal studies can be used in formulating a range of dosage for use in human. The dosage may vary depending upon the dosage form employed and the route of administration utilized. The exact formulation, route of administration and dosage can be chosen by the individual physician in view of the patient's condition. [See e.g., Fingl, et al., (1975) “The Pharmacological Basis of Therapeutics”, Ch. 1 p.1].

[0232] Depending on the severity and responsiveness of the condition to be treated, dosing can be of a single or a plurality of administrations, with course of treatment lasting from several days to several weeks or until cure is effected or diminution of the disease state is achieved.

[0233] The amount of a composition to be administered will, of course, be dependent on the subject being treated, the severity of the affliction, the manner of administration, the judgment of the prescribing physician, etc.

[0234] The present invention further contemplate killing microbes which are present on plants with the compositions which comprise the isolated antibacterial agents of the present invention, or alternatively the Bacillus bacteria described herein (for example that having a 16S rRNA sequence as set forth in SEQ ID NO: 1, 2 or 3).

[0235] Thus, the isolated agents or microbes themselves may be used for use in controlling plant diseases (i.e. at the pre-harvest stage).

[0236] As used herein the term “plant” refers to whole plants, a plant tissue, a plant organ, a fruit, a vegetable, an eatable portion of a plant, a grafted plant including seeds, shoots, stems, roots (including tubers), rootstock, scion, and plant cells, tissues, fruit, flower and organs. The plant may be in any form including cuttings and harvested material (e.g., fruit).

[0237] In one embodiment, the plant is an agricultural plant.

[0238] The phrase “agricultural plants”, or “plants of agronomic importance”, refers to plants that are cultivated by humans for food, feed, fiber, and fuel purposes. In one embodiment, the plant is not a wild plant.

[0239] In one embodiment, a monocotyledonous plant is treated. Monocotyledonous plants belong to the orders of the Alismatales, Arales, Arecales, Bromeliales, Commelinales, Cyclanthales, Cyperales, Eriocaulales, Hydrocharitales, Juncales, Lilliales, Najadales, Orchidales, Pandanales, Poales, Restionales, Triuridales, Typhales, and Zingiberales. Plants belonging to the class of the Gymnospermae are Cycadales, Ginkgoales, Gnetales, and Pinales. In a particular embodiment, the monocotyledonous plant can be selected from the group consisting of a maize, rice, wheat, barley, and sugarcane.

[0240] In another embodiment, a dicotyledonous plant is treated, including those belonging to the orders of the Aristochiales, Asterales, Batales, Campanulales, Capparales, Caryophyllales, Casuarinales, Celastrales, Cornales, Diapensales, Dilleniales, Dipsacales, Ebenales, Ericales, Eucomiales, Euphorbiales, Fabales, Fagales, Gentianales, Geraniales, Haloragales, Hamamelidales, Middles, Juglandales, Lamiales, Laurales, Lecythidales, Leitneriales, Magniolales, Malvales, Myricales, Myrtales, Nymphaeales, Papeverales, Piperales, Plantaginales, Plumb aginales, Podostemales, Polemoniales, Polygalales, Polygonales, Primulales, Proteales, Rafflesiales, Ranunculales, Rhamnales, Rosales, Rubiales, Salicales, Santales, Sapindales, Sarraceniaceae, Scrophulariales, Theales, Trochodendrales, Umbellales, Urticales, and Violates. In a particular embodiment, the dicotyledonous plant can be selected from the group consisting of cotton, bean, pepper, and tomato.

[0241] Preferably, the plant is an agricultural plant. Agricultural plants include monocotyledonous species such as: maize (Zea mays), common wheat (Triticum aestivum), spelt (Triticum spelta), einkorn wheat (Triticum monococcum), emmer wheat (Triticum dicoccum), durum wheat (Triticum durum), Asian rice (Oryza sativa), African rice (Oryza glabaerreima), wild rice (Zizania aquatica, Zizania latifolia, Zizania palustris, Zizania texana), barley (Hordeum vulgare), Sorghum (Sorghum bicolor), Finger millet (Eleusine coracana), Proso millet (Panicum miliaceum), Pearl millet (Pennisetum glaucum), Foxtail millet (Setaria italica), Oat (Avena sativa), Triticale (Triticosecale), rye (Secale cereal), Russian wild rye (Psathyrostachys juncea), bamboo (Bambuseae), or sugarcane (e.g., Saccharum arundinaceum, Saccharum barberi, Saccharum bengalense, Saccharum edule, Saccharum munja, Saccharum officinarum, Saccharum procerum, Saccharum ravennae, Saccharum robustum, Saccharum sinense, or Saccharum spontaneum); as well as dicotyledonous species such as: soybean (Glycine max), canola and rapeseed cultivars (Brassica napus), cotton (genus Gossypium), alfalfa (Medicago sativa), cassava (genus Manihot), potato (Solanum tuberosum), tomato (Solanum lycopersicum), pea (Pisum sativum), chick pea (Cicer arietinum), lentil (Lens culinaris), flax (Linum usitatissimum) and many varieties of vegetables.

[0242] The isolated antimicrobial agents (or the bacteria themselves) can be applied to plants by spraying, dusting, coating, soaking, irrigation, drenching or otherwise treating them with the active ingredients or alternatively, by treating with the active ingredients the plant seeds, the soil around the plant, or the soil, rice pads or the water for hydroponic culture where the seeds are to be sown.

[0243] The application may be affected either before or after the plant is infected with a pathogen.

[0244] According to an embodiment, the regimen is performed such as to control the spread of a pathogen and/or eliminate a pathogen and/or eliminate/reduce/minimize any damage that can be caused by the pathogen.

[0245] The antimicrobial agents (or the bacteria themselves) can be formulated as dips, sprays, seed coatings or concentrates.

[0246] Thus, according to another aspect of the present invention there is provided a method for prolonging the shelf life of a plant, the post-harvest quality of a plant, increasing a plant performance parameter, or a combination thereof comprising pre-harvest contacting said plant with an effective amount of Bacillus bacteria having a 16S rRNA sequence as set forth in SEQ ID NOs: 1, 2 or 3, thereby prolonging the shelf life of a plant, the post-harvest quality of a plant, or a combination thereof.

[0247] The shelf-life may be improved by at least 1 day, 2 days, 3 days, four days, five days, six days, 7 days, 10 days or more.

[0248] It will be appreciated that by controlling (i.e. reducing) pathogenic infection in the plant, the post-harvest quality of the plant is improved and losses are reduced. In one embodiment, the amount of bacteria which can cause disease in humans is reduced, thereby improving the safety of the plant for consumption. Concurrently, or alternatively, plant performance parameters may also be improved (including, but not limited to growth parameters, crop production, and pathogenic resistance).

[0249] The contacting may be effected at any stage of the plant life cycle e.g. a post-blossom stage, a blossom stage, a pre-blossom stage, or any combination thereof.

[0250] The contacting may be effected in the vicinity of or onto: a root, a stem, a trunk, a seed, a fruit, a flower, a leaf, or any combination thereof of the plant.

[0251] According to an embodiment, application is carried out in an open field. According to an embodiment, application is carried out in a greenhouse. According to an embodiment, the application is carried out once. According to an embodiment, at least two applications are carried out at any regimen or duration.

[0252] According to an embodiment, the applying comprises repeated application (2 or more applications e.g., every week, seasonal, bi-weekly, bi-monthly etc.). Repeated applications are especially envisaged for field/greenhouse treatments.

[0253] According to an embodiment, repeated application comprises weekly, daily, monthly, or bi-monthly administration during blossom, post-blossom, pre-blossom, or any combination thereof. For example, suggested regimen may include but is not limited to, spraying plants in open fields and green house, adding to irrigation of plants grown in the open field, green house and in pots.

[0254] As well as pre-harvest treatment, the present inventors contemplate post-harvest treatment with the Bacillus bacteria described herein or antimicrobial agents derived therefrom.

[0255] Thus, according to still another aspect of the present invention there is provided a method for prolonging the shelf life of a plant or the post-harvest quality of a plant, or a combination thereof comprising post-harvest contacting said plant with an effective amount of Bacillus bacteria of the species subtilis or velezensis, thereby prolonging the shelf life of a plant or the post-harvest quality of a plant, or a combination thereof.

[0256] The post-harvest contacting may be carried out no more than 6 hours following harvesting, no more than 12 hours following harvesting, no more than 1 day following harvesting, no more than 2 days following harvesting, no more than 3 days following harvesting, or no more than 4 day following harvesting,

[0257] According to an embodiment, the post-harvest contacting is carried out in a storage facility (e.g., dark room, refrigerator).

[0258] The contacting may comprise dipping the whole foliage branch in the solution post-harvest, adding to vase of cut flowers before and/or after harvest and possibly before shipment.

[0259] Since the antimicrobial agents derived from the Bacillus bacteria were shown to be effective at killing bacteria which are pathogenic to humans, the present inventors contemplate that the Bacillus bacteria (and agents isolated therefrom) may be used as a preservative in the food industry in general (and not just for plant-based materials).

[0260] Thus, according to still another aspect of the present invention, there is provided a method of preserving a food product comprising contacting the food with a Bacillus bacteria of the species Subtilis or Velezensis or an agent derived from said Bacillus bacteria under conditions that down-regulate an activity and/or an amount of at least one type of microbe that is capable of spoiling the food product, thereby preserving the food product.

[0261] In one embodiment, the food is a plant derived food. In another embodiment, the food is an animal derived food. In still another embodiment, the food is a dairy food. In still another embodiment, the food is a poultry food.

[0262] The Bacillus bacteria described herein (or anti-microbial agents isolated therefrom) may be provided per se, or may be formulated with an agriculturally acceptable carrier.

[0263] As used herein the term “agriculturally acceptable carrier” refers to a material that facilitates application of the bacteria (or agent isolated therefrom) to the intended target, which may be for example a plant, a plant material, compost, earth, surroundings or equipment, or that facilitates storage, transport or handling. Carriers used in compositions for application to plants and plant material are preferably non-phytotoxic or only mildly phytotoxic. A suitable carrier may be a solid, liquid or gas depending on the desired formulation. In one embodiment the carriers include polar liquid carriers such as water, mineral oils and vegetable oils. In one embodiment the carrier enhances the stability of the active ingredient as described herein.

[0264] The carrier can include a dispersant, a surfactant, an additive, water, a thickener, an anti-caking agent, residue breakdown, a composting formulation, a granular application, diatomaceous earth, an oil, a coloring agent, a stabilizer, a preservative, a polymer, a coating, or a combination thereof. One of ordinary skill in the art can readily determine the appropriate carrier to be used taking into consideration factors such as a particular bacterial strain, plant to which the bacteria is to be applied, type of soil, climate conditions, whether the bacteria is in liquid, solid or powder form, and the like.

[0265] The additive can comprise an oil, a gum, a resin, a clay, a polyoxyethylene glycol, a terpene, a viscid organic, a fatty acid ester, a sulfated alcohol, an alkyl sulfonate, a petroleum sulfonate, an alcohol sulfate, a sodium alkyl butane diamate, a polyester of sodium thiobutant dioate, a benzene acetonitrile derivative, a proteinaceous material, or a combination thereof.

[0266] The surfactant can contain a heavy petroleum oil, a heavy petroleum distillate, a polyol fatty acid ester, a polyethoxylated fatty acid ester, an aryl alkyl polyoxyethylene glycol, an alkyl amine acetate, an alkyl aryl sulfonate, a polyhydric alcohol, an alkyl phosphate, or a combination thereof.

[0267] The anti-caking agent can include a sodium salt such as a sodium sulfite, a sodium sulfate, a sodium salt of monomethyl naphthalene sulfonate, a sodium salt of dimethyl naphthalene sulfonate, or a combination thereof; or a calcium salt such as calcium carbonate, diatomaceous earth, or a combination thereof.

[0268] Exemplary agriculturally acceptable carriers include, but are not limited to, vermiculite, charcoal, sugar factory carbonation press mud, rice husk, carboxymethyl cellulose, peat, perlite, fine sand, calcium carbonate, flour, alum, a starch, talc, polyvinyl pyrrolidone, or a combination thereof.

[0269] The Bacillus cultures can be prepared as solid, liquid. emulsion or powdered formulations as is known in the art. The cultures of the present invention can be formulated as a seed coating formulation, a liquid formulation for application to plants or to a plant growth medium, or a solid formulation for application to plants or to a plant growth medium.

[0270] When the Bacillus culture is prepared as a liquid formulation for application to plants or to a plant growth medium, it can be prepared in a concentrated formulation or a working form formulation. In some instances, the seed coating formulation of the present invention is an aqueous or oil-based solution for application to seeds.

[0271] When the Bacillus culture of the present invention is prepared as a solid formulation for application to plants or to a plant growth medium, it can be prepared as a granular formulation or a powder agent. The seed coating formulation can be a powder or granular formulation for application to seeds.

[0272] The Bacillus culture (or antimicrobial agent isolated therefrom) can further include an agrochemical (i.e. an agent that promotes the growth of a plant).

[0273] Thus, according to another aspect of the present invention there is provided an article of manufacture comprising Bacillus bacteria which comprise a 16S rRNA nucleic acid sequence as set forth in SEQ ID NO: 1, 2 or 3 and an agent which promotes the growth of a plant.

[0274] Examples of agents that promote the growth of a plant include a fertilizer, a micronutrient fertilizer material, an insecticide, a herbicide, a plant growth regulator, an acaricide, a rodenticide, a fungicide, a nutrient, a molluscicide, an algicide, a pesticide, a fungal inoculant, or a combination thereof.

[0275] In some instances, the fertilizer is a liquid fertilizer. The agrochemical can either be applied to a plant growth medium or to plants and/or seeds. Liquid fertilizer can include, without limitation, ammonium sulfate, ammonium nitrate, ammonium sulfate nitrate, ammonium chloride, ammonium bisulfate, ammonium polysulfide, ammonium thiosulfate, aqueous ammonia, anhydrous ammonia, ammonium polyphosphate, aluminum sulfate, calcium nitrate, calcium ammonium nitrate, calcium sulfate, calcined magnesite, calcitic limestone, calcium oxide, calcium nitrate, dolomitic limestone, hydrated lime, calcium carbonate, diammonium phosphate, monoammonium phosphate, magnesium nitrate, magnesium sulfate, potassium nitrate, potassium chloride, potassium magnesium sulfate, potassium sulfate, sodium nitrates, magnesian limestone, magnesia, urea, urea-formaldehydes, urea ammonium nitrate, sulfur-coated urea, polymer-coated urea, isobutylidene diurea, K₂SO₄—2MgSO₄, kainite, sylvinite, kieserite, Epsom salts, elemental sulfur, marl, ground oyster shells, fish meal, oil cakes, fish manure, blood meal, rock phosphate, super phosphates, slag, bone meal, wood ash, manure, bat guano, peat moss, compost, green sand, cottonseed meal, feather meal, crab meal, fish emulsion, or a combination thereof.

[0276] The micronutrient fertilizer material can comprise boric acid, a borate, a boron frit, copper sulfate, a copper frit, a copper chelate, a sodium tetraborate decahydrate, an iron sulfate, an iron oxide, iron ammonium sulfate, an iron frit, an iron chelate, a manganese sulfate, a manganese oxide, a manganese chelate, a manganese chloride, a manganese frit, a sodium molybdate, molybdic acid, a zinc sulfate, a zinc oxide, a zinc carbonate, a zinc frit, zinc phosphate, a zinc chelate, or a combination thereof.

[0277] The insecticide can include an organophosphate, a carbamate, a pyrethroid, an acaricide, an alkyl phthalate, boric acid, a borate, a fluoride, sulfur, a haloaromatic substituted urea, a hydrocarbon ester, a biologically-based insecticide, or a combination thereof.

[0278] The herbicide can comprise a chlorophenoxy compound, a nitrophenolic compound, a nitrocresolic compound, a dipyridyl compound, an acetamide, an aliphatic acid, an anilide, a benzamide, a benzoic acid, a benzoic acid derivative, anisic acid, an anisic acid derivative, a benzonitrile, benzothiadiazinone dioxide, a thiocarbamate, a carbamate, a carbanilate, chloropyridinyl, a cyclohexenone derivative, a dinitroaminobenzene derivative, a fluorodinitrotoluidine compound, isoxazolidinone, nicotinic acid, isopropylamine, an isopropylamine derivative, oxadiazolinone, a phosphate, a phthalate, a picolinic acid compound, a triazine, a triazole, a uracil, a urea derivative, endothall, sodium chlorate, or a combination thereof.

[0279] The fungicide can comprise a substituted benzene, a thiocarbamate, an ethylene bis dithiocarbamate, a thiophthalidamide, a copper compound, an organomercury compound, an organotin compound, a cadmium compound, anilazine, benomyl, cyclohexamide, dodine, etridiazole, iprodione, metlaxyl, thiamimefon, triforine, or a combination thereof.

[0280] The fungal inoculant can comprise a fungal inoculant of the family Glomeraceae, a fungal inoculant of the family Claroidoglomeraceae, a fungal inoculant of the family Gigasporaceae, a fungal inoculant of the family Acaulosporaceae, a fungal inoculant of the family Sacculosporaceae, a fungal inoculant of the family Entrophosporaceae, a fungal inoculant of the family Pacidsporaceae, a fungal inoculant of the family Diversisporaceae, a fungal inoculant of the family Paraglomeraceae, a fungal inoculant of the family Archaeosporaceae, a fungal inoculant of the family Geosiphonaceae, a fungal inoculant of the family Ambisporaceae, a fungal inoculant of the family Scutellosporaceae, a fungal inoculant of the family Dentiscultataceae, a fungal inoculant of the family Racocetraceae, a fungal inoculant of the phylum Basidiomycota, a fungal inoculant of the phylum Ascomycota, a fungal inoculant of the phylum Zygomycota, or a combination thereof.

[0281] In one embodiment, the plant growth regulator is selected from the group consisting of: Abscisic acid, amidochlor, ancymidol, 6-benzylaminopurine, brassinolide, butralin, chlormequat (chlormequat chloride), choline chloride, cyclanilide, daminozide, dikegulac, dimethipin, 2,6-dimethylpuridine, ethephon, flumetralin, flurprimidol, fluthiacet, forchlorfenuron, gibberellic acid, inabenfide, indole-3-acetic acid, maleic hydrazide, mefluidide, mepiquat (mepiquat chloride), naphthaleneacetic acid, N-6-benzyladenine, paclobutrazol, prohexadione (prohexadione-calcium), prohydrojasmon, thidiazuron, triapenthenol, tributyl phosphorotrithioate, 2,3,5-tri-iodobenzoic acid, trinexapac-ethyl and uniconazole. Other examples of plant growth regulators which can be comprised in the article of manufacture include those based on dichlorophene and benzylalcohol hemi formal (Proxel® from ICI or Acticide® RS from Thor Chemie and Kathon® MK from Rohm & Haas) and isothiazolinone derivatives such as alkylisothiazolinones and benzisothiazolinones (Acticide® MBS from Thor Chemie). Other plant growth regulators that can be incorporated seed coating compositions are described in US 2012/0108431, which is incorporated by reference in its entirety.

[0282] Preferred nematode-antagonistic biocontrol agents include ARF18; Arthrobotrys spp.; Chaetomium spp.; Cylindrocarpon spp.; Exophilia spp.; Fusarium spp.; Gliocladium spp.; Hirsutella spp.; Lecanicillium spp.; Monacrosporium spp.; Myrothecium spp.; Neocosmospora spp.; Paecilomyces spp.; Pochonia spp.; Stagonospora spp.; vesicular-arbuscular mycorrhizal fungi, Burkholderia spp.; Pasteuria spp., Brevibacillus spp.; Pseudomonas spp.; and Rhizobacteria.

[0283] Particularly preferred nematode-antagonistic biocontrol agents include ARF18, Arthrobotrys oligospora, Arthrobotrys dactyloides, Chaetomium globosum, Cylindrocarpon heteronema, Exophilia jeanselmei, Exophilia pisciphila, Fusarium aspergilus, Fusarium solani, Gliocladium catenulatum, Gliocladium roseum, Gliocladium vixens, Hirsutella rhossiliensis, Hirsutella minnesotensis, Lecanicillium lecanii, Monacrosporium drechsleri, Monacrosporium gephyropagum, Myrotehcium verrucaria, Neocosmospora vasinfecta, Paecilomyces lilacinus, Pochonia chlamydosporia, Stagonospora heteroderae, Stagonospora phaseoli, vesicular-arbuscular mycorrhizal fungi, Burkholderia cepacia, Pasteuria penetrans, Pasteuria thornei, Pasteuria nishizawae, Pasteuria ramosa, Pastrueia usage, Brevibacillus laterosporus strain G4, Pseudomonas fluorescens and Rhizobacteria.

[0284] In another embodiment, the article of manufacture can comprise a nutrient. The nutrient can be selected from the group consisting of a nitrogen fertilizer including, but not limited to Urea, Ammonium nitrate, Ammonium sulfate, Non-pressure nitrogen solutions, Aqua ammonia, Anhydrous ammonia, Ammonium thiosulfate, Sulfur-coated urea, Urea-formaldehydes, IBDU, Polymer-coated urea, Calcium nitrate, Ureaform, and Methylene urea, phosphorous fertilizers such as Diammonium phosphate, Monoammonium phosphate, Ammonium polyphosphate, Concentrated superphosphate and Triple superphosphate, and potassium fertilizers such as Potassium chloride, Potassium sulfate, Potassium-magnesium sulfate, Potassium nitrate. Such compositions can exist as free salts or ions within the seed coat composition. Alternatively, nutrients/fertilizers can be complexed or chelated to provide sustained release over time.

[0285] In one embodiment, the article of manufacture may comprise a rodenticide selected from the group of substances consisting of 2-isovalerylindan-1,3-dione, 4-(quinoxalin-2-ylamino) benzenesulfonamide, alpha-chlorohydrin, aluminum phosphide, antu, arsenous oxide, barium carbonate, bisthiosemi, brodifacoum, bromadiolone, bromethalin, calcium cyanide, chloralose, chlorophacinone, cholecalciferol, coumachlor, coumafuryl, coumatetralyl, crimidine, difenacoum, difethialone, diphacinone, ergocalciferol, flocoumafen, fluoroacetamide, flupropadine, flupropadine hydrochloride, hydrogen cyanide, iodomethane, lindane, magnesium phosphide, methyl bromide, norbormide, phosacetim, phosphine, phosphorus, pindone, potassium arsenite, pyrinuron, scilliroside, sodium arsenite, sodium cyanide, sodium fluoroacetate, strychnine, thallium sulfate, warfarin and zinc phosphide.

[0286] For any of the plant-related or food-related aspects described herein above, the present inventors further contemplate application of chlorine. The chlorine is preferably in a solid form—for example as calcium hypochlorite. The bacterial compositions and antimicrobial products described herein may be co-applied (in the same composition i.e. co-formulated, or in separate formulations), may be applied prior to or following application of the chlorine-based product. In one embodiment, the amount of chlorine based product added is less than the amount which is typically administered since the bacterial component may act synergistically with the chlorine-based product. In one embodiment, about 20,000 ppm of calcium hypochlorite is added, about 10,000 ppm of calcium hypochlorite is added or about 5,000 ppm of calcium hypochlorite is added.

[0287] Thus, the amount of calcium hypochlorite may be between 5,000 ppm to 50,000 ppm, 5,000 ppm to 40,000 ppm, 5,000 ppm to 30,000 ppm, 5,000 ppm to 20,000 ppm, 5,000 ppm to 10,000 ppm.

[0288] According to a particular embodiment, the food is a sprout (e.g. alfalfa sprout) or a seed.

[0289] As used herein the term “about” refers to ±10%.

[0290] The terms “comprises”, “comprising”, “includes”, “including”, “having” and their conjugates mean “including but not limited to”.

[0291] The term “consisting of” means “including and limited to”.

[0292] The term “consisting essentially of” means that the composition, method or structure may include additional ingredients, steps and/or parts, but only if the additional ingredients, steps and/or parts do not materially alter the basic and novel characteristics of the claimed composition, method or structure.

[0293] As used herein, the singular form “a”, “an” and “the” include plural references unless the context clearly dictates otherwise. For example, the term “a compound” or “at least one compound” may include a plurality of compounds, including mixtures thereof.

[0294] Throughout this application, various embodiments of this invention may be presented in a range format. It should be understood that the description in range format is merely for convenience and brevity and should not be construed as an inflexible limitation on the scope of the invention. Accordingly, the description of a range should be considered to have specifically disclosed all the possible subranges as well as individual numerical values within that range. For example, description of a range such as from 1 to 6 should be considered to have specifically disclosed subranges such as from 1 to 3, from 1 to 4, from 1 to 5, from 2 to 4, from 2 to 6, from 3 to 6 etc., as well as individual numbers within that range, for example, 1, 2, 3, 4, 5, and 6. This applies regardless of the breadth of the range.

[0295] Whenever a numerical range is indicated herein, it is meant to include any cited numeral (fractional or integral) within the indicated range. The phrases “ranging/ranges between” a first indicate number and a second indicate number and “ranging/ranges from” a first indicate number “to” a second indicate number are used herein interchangeably and are meant to include the first and second indicated numbers and all the fractional and integral numerals therebetween.

[0296] As used herein the term “method” refers to manners, means, techniques and procedures for accomplishing a given task including, but not limited to, those manners, means, techniques and procedures either known to, or readily developed from known manners, means, techniques and procedures by practitioners of the chemical, pharmacological, biological, biochemical and medical arts.

[0297] As used herein, the term “treating” includes abrogating, substantially inhibiting, slowing or reversing the progression of a condition, substantially ameliorating clinical or aesthetical symptoms of a condition or substantially preventing the appearance of clinical or aesthetical symptoms of a condition.

[0298] It is appreciated that certain features of the invention, which are, for clarity, described in the context of separate embodiments, may also be provided in combination in a single embodiment.

[0299] Conversely, various features of the invention, which are, for brevity, described in the context of a single embodiment, may also be provided separately or in any suitable subcombination or as suitable in any other described embodiment of the invention. Certain features described in the context of various embodiments are not to be considered essential features of those embodiments, unless the embodiment is inoperative without those elements.

[0300] Various embodiments and aspects of the present invention as delineated hereinabove and as claimed in the claims section below find experimental support in the following examples.

### EXAMPLES

[0301] Reference is now made to the following examples, which together with the above descriptions illustrate some embodiments of the invention in a non limiting fashion.

[0302] Generally, the nomenclature used herein and the laboratory procedures utilized in the present invention include molecular, biochemical, microbiological and recombinant DNA techniques. Such techniques are thoroughly explained in the literature. See, for example, “Molecular Cloning: A laboratory Manual” Sambrook et al., (1989); “Current Protocols in Molecular Biology” Volumes I-III Ausubel, R. M., ed. (1994); Ausubel et al., “Current Protocols in Molecular Biology”, John Wiley and Sons, Baltimore, Maryland (1989); Perbal, “A Practical Guide to Molecular Cloning”, John Wiley & Sons, New York (1988); Watson et al., “Recombinant DNA”, Scientific American Books, New York; Birren et al. (eds) “Genome Analysis: A Laboratory Manual Series”, Vols. 1-4, Cold Spring Harbor Laboratory Press, New York (1998); methodologies as set forth in U.S. Pat. Nos. 4,666,828; 4,683,202; 4,801,531; 5,192,659 and 5,272,057; “Cell Biology: A Laboratory Handbook”, Volumes I-III Cellis, J. E., ed. (1994); “Culture of Animal Cells—A Manual of Basic Technique” by Freshney, Wiley-Liss, N. Y. (1994), Third Edition; “Current Protocols in Immunology” Volumes I-III Coligan J. E., ed. (1994); Stites et al. (eds), “Basic and Clinical Immunology” (8th Edition), Appleton & Lange, Norwalk, C T (1994); Mishell and Shiigi (eds), “Selected Methods in Cellular Immunology”, W. H. Freeman and Co., New York (1980); available immunoassays are extensively described in the patent and scientific literature, see, for example, U.S. Pat. Nos. 3,791,932; 3,839,153; 3,850,752; 3,850,578; 3,853,987; 3,867,517; 3,879,262; 3,901,654; 3,935,074; 3,984,533; 3,996,345; 4,034,074; 4,098,876; 4,879,219; 5,011,771 and 5,281,521; “Oligonucleotide Synthesis” Gait, M. J., ed. (1984); “Nucleic Acid Hybridization” Hames, B. D., and Higgins S. J., eds. (1985); “Transcription and Translation” Hames, B. D., and Higgins S. J., eds. (1984); “Animal Cell Culture” Freshney, R. I., ed. (1986); “Immobilized Cells and Enzymes” IRL Press, (1986); “A Practical Guide to Molecular Cloning” Perbal, B., (1984) and “Methods in Enzymology” Vol. 1-317, Academic Press; “PCR Protocols: A Guide To Methods And Applications”, Academic Press, San Diego, C A (1990); Marshak et al., “Strategies for Protein Purification and Characterization—A Laboratory Course Manual” CSHL Press (1996); all of which are incorporated by reference as if fully set forth herein. Other general references are provided throughout this document. The procedures therein are believed to be well known in the art and are provided for the convenience of the reader. All the information contained therein is incorporated herein by reference.

### Example 1

[0303] Materials and Methods

[0304] Bacterial cultures were maintained as glycerol stocks and stored at −80° C. For each experiment, a fresh culture was made and bacteria were grown in Lysogeny broth Luria-Bertani for 18-20 h at 37° C. with shaking (150 rpm) to obtain stationary phase cultures. Biofilm generation and pigment secretion of Bacillus subtilis (3610) and tested mutants were achieved at 30° C. in the biofilm-promoting medium LBGM (LB plus 1% [vol/vol] glycerol and 0.1 mM MnSO4). For biofilm colony, 3 l of the Bacillus stationary phase cultures was applied to LBGM solid medium containing 1.5% Bacto agar. Salmonella and other pathogens were washed twice with sterile distilled water (SDW) by centrifugation at 2,700 g for 10 minutes, and the pellet was resuspended in SDW. Pathogens (10⁸ cells/ml) were spread on Nutrient agar, then an agar slab of 5 mm in diameter was cut from 3-day bacillus colony and placed on the pathogen layer. Following a 24 hour incubation at 25° C., the plates were checked for inhibition zones. The results in the tables are presented as the mean diameter of the inhibition zone+SD for 3 independent experiments. Images of the colonies on the plates were taken using a 5 megapixel CMOS camera AxioCam ERc 5 s.

### Results

[0305] Effect of Growth Media on Salmonella Inhibition

[0306] Bacillus subtilis 3610 colony was grown on different agar media for 72 hours and then Salmonella inhibition was estimated (FIGS. 1A-B). Results demonstrate that only colonies grown on LBGM notably inhibit Salmonella growth (14±0.5 mm). Essentially, no Salmonella inhibition was detected for Bacillus colonies developed on LB or NA.

[0307] It was further noted that growth inhibition of Salmonella colonies nearby a Bacillus colony occurred on LBGM but not on LB (FIGS. 2A-B). The Salmonella colony was ‘injured’ near the Bacillus colony at the boundary of the pigment secretion.

[0308] Kinetics of Bacillus subtilis 3610 Colony Biofilm Formation and Salmonella Inhibition

[0309] In order to ascertain whether the stage of biofilm formation and accordingly pigment production affects Salmonella inhibition, cells of B. subtilis were grown on LBGM agar for 24, 48 and 72 hours (FIG. 3A). Although more biofilm was formed and pigment secreted with time (FIG. 3A), the level of Salmonella inhibition was not affected significantly at different time points (FIG. 3B).

[0310] Biofilm Formation and Salmonella Inhibition

[0311] To establish correlation between biofilm formation on LBGM and Salmonella inhibition, two mutants of biofilm formation and double mutant was tested in similar experiments described above. FIG. 4A demonstrates that the tasA mutant partially attenuated biofilm formation whilst the eps and double mutant showed a reduced amount of biofilm formation and pigment secretion. Correlatively, biofilm mutants grown on LBGM, demonstrated different levels of the Salmonella inhibition (FIG. 4B). While, the eps and double mutant demonstrated reduced inhibition of Salmonella compared to WT, the tasA mutant showed a similar inhibition to WT.

[0312] Bacillus Colony had Broad-Spectrum Antimicrobial Effect

[0313] To elucidate whether an antimicrobial pigment would demonstrate a broad-spectrum antimicrobial activity, its inhibitory effect was tested on two Gram-positive and three Gram-negative pathogens using a similar methodology. As can be seen in Table 2, all of the tested species were found to be sensitive to the pigment. Interestingly, the bacterium Staphylococcus aureus was found to be most sensitive to the pigment's activity (FIG. 5).

TABLE 2

| Pathogen | Inhibition diameter (mm) |
|---|---|
| Salmonella Enterica | 13 ± 0.5 |
| Enteropathogenic Escherichia | 12 ± 0.8 |
| coli O55:H7 | |
| Staphylococcus aureus | 20 ± 1 |
| Staphylococcus epidermidis | 18 ± 0.5 |
| Bacillus cereus | 12 ± 0.5 |

### Example 2

[0314] Antimicrobial Activity of the Purified Pigment Against Human Pathogens

### Materials and Methods

[0315] Isolation of inhibitory pigments: Following removal of Biofilm colonies formed by Bacillus subtilis on a LBGM plate for 3 days at a temperature of 30° C., the agar substrate was collected for subsequent purification. The agar was crushed with a homogenizer in the presence of 25 ml DDW and centrifuged at a speed of 8000 rpm for 10 minutes. The supernatant with the soluble pigment was passed through 0.22-micron filter, frozen and dried in a lyophilizer for 3 days. The resulting precipitate was 10 fold concentrated by re-suspending with 2.5 ml DDW. A black pigment was purified from the Bacillus isolate BB124, a plant derived bacterium that was identified by 16 S ribosomal RNA analysis as B. subtilis while the brown pigment was purified from B. subtilis NCIB 3610.

[0316] Preparation of bacterial cultures: Salmonella enterica serovar Typhimurium, Bacillus cereus ATCC 10987 and Staphylococcus aureus ATCC 25923 were used in the experiments. Bacterial cells were maintained as glycerol stocks and stored at −80° C. For each experiment, a fresh culture was made and bacteria were grown in LB broth for 18-20 h at 37° C. with shaking (150 rpm) to obtain stationary phase cultures. Cultures were washed twice with sterile distilled water (SDDW) by centrifugation at 2,700 g for 10 minutes, and the pellet was resuspended in SDDW.

[0317] Analysis of anti-microbial activity of purified pigment by agar-diffusion assay: Washed bacterial cells were spread on NA (nutrient agar) plate in a concentration of about 10⁸ CFU/ml. A 5 mm-well was created in the center of the plate using sterile pipette and filled with the purified pigment. A Zone of inhibition around the well was determined after 24 h growth in 25° C.

[0318] Analysis of anti-microbial activity of purified pigment in bacterial suspension: For each bacterial strain, the 10⁴ CFU/ml of the cells were grown in LB supplemented by the purified pigment 1:100 (v/v). The tubes were incubated for 24 hours at 25° C. Next, the cell number (CFU) of the pathogens was determined by plating on LB agar plates for Bacillus cereus and Staphylococcus aureus and on XLD plates for Salmonella. Similar experiments were performed in nutrient broth (NB) media for Salmonella only.

### Results

[0319] Substantial antimicrobial activity was detected by the black and the brown pigments on the growth of B. cereus and S. aureus on plates. The black and brown pigments demonstrated a similar effect on these two pathogens. In contrast, only slight effect of the black pigment was detected for Salmonella inhibition on a plate (FIG. 6).

[0320] On the other hand, strongest effect was detected in liquid for the B. cereus, which was eliminated by the brown or black pigments. For the S. aureus, the brown pigment showed better activity and reduced the bacterial number in four logs compared to the growth in LB. However, the black pigment had stronger effect on Salmonella growth inhibition (also in NB medium) then the brown pigment, and inhibited Salmonella growth by two logs (FIGS. 7A-B).

### Example 3

[0321] Sprouts-Derived Medium Induces Anti-Salmonella Activity of Bacillus

### Materials and Methods

[0322] Preparation of the sprouts-derived medium: Seeds of alfalfa plant (Medicago sativa) were grown in plastic cups at 25° C. for four days. After germination, 2 grams of sprouts were added to 20 ml of DDW and crushed in Stomacher for 2 cycles of 2 min. The crude extract was centrifuged for 10 min in 6000 rpm and the supernatant was boiled to release the components from the plant derivate. After boiling, the extract was filtered through a 0.22-micron filter.

[0323] Bacteria preparation: Bacterial cultures were maintained as glycerol stocks and stored at −80° C. For each experiment, a fresh culture was made and bacteria were grown in LB broth for 18-20 h at 37° C. with shaking (150 rpm) to obtain stationary phase cultures. Salmonella and Bacillus cells were washed twice with sterile distilled water (SDW) by centrifugation at 2,700 g for 10 minutes, and the pellet was resuspended in SDW. Two initial concentration of Salmonella and Bacillus 10² cells/ml or 10⁷ cells/ml were used.

[0324] Bacterial strains: Salmonella enterica serovar Typhimurium and Bacillus strain (referred to herein as BX77) was used.

### Results

[0325] Salmonella—Bacillus interactions in different growth media

[0326] For each experiment, Salmonella and Bacillus (BX77) were added to 12 ml plastic tubes with 1 ml boiled and filtrated sprouts derived medium (BFSM). To determine Salmonella growth in BFSA media without Bacillus, some of the tubes were inoculated with Salmonella only. Tubes were kept in a 25° C. incubator for a maximum of 72 hours. Following 24, 48, 72 hours, Salmonella cell numbers were determined using a colony-forming unit (CFU) plating and counting method on Salmonella selective XLD agar plates. Similar experiments were carried out in Nutrient broth (NB) media.

[0327] Results summarized in FIGS. 8A-B demonstrate strong Salmonella inhibition and killing following 72 h incubation with Bacillus BX77 grown in BFSA. No Salmonella was detected following 72 h incubation both with low and high Bacillus load.

[0328] In case of NB, only slight inhibition of Salmonella was detected following the 72 h incubation of Salmonella with high load of Bacillus cells. Interestingly, growth of Bacillus cells resulted in a significant change of the suspension color from white to yellow (FIG. 9). In contrast, Salmonella did not cause a similar change in suspension color. It was therefore hypothesized that yellow pigment secretion by Bacillus cells in sprouts-derived media is related to its anti-Salmonella properties.

### Survival of Salmonella in Conditioned-BFSA Following Incubation with BX77 Cells

[0329] To determine whether Bacillus cells secrete anti-bacterial agents when cultured in the presence of BFSA, the medium was inoculated with Bacillus cells for 3 days as described herein above. Following 3 days, BFSA was filtered to remove the Bacillus cells and Salmonella was added for another 24 hours at 25° C., after which the number of Salmonella was determined.

[0330] The medium that was inoculated with Bacillus cells inhibited the growth or killed the Salmonella cells, depending on the incubation times. The quantity of the Salmonella cells was reduced by three log when initially inoculated as a high load, whereas it was completely eliminated in the low-cell load. Thus, the results indicate that Bacillus secretes active components against Salmonella into a sprouts-derived media.

### Example 4

### Anti-Salmonella Activity of Bacillus on Alfalfa Seeds

[0331] First, Alfalfa (Mledicago sativa) seeds were inoculated with the mCherry-tagged Salmonella in the presence of the GFP-labeled Bacillus cells in dip water for 4 days. Subsequently, fluorescently tagged cells of Salmonella and B. subtilis (strain 3610) were visualized on the alfalfa root (generated through seed germination and the root regrowth) by confocal laser scanning microscope (Olympus IX81, Tokyo, Japan). Red florescence of the Salmonella cells was visualized using excitation wavelength of 543 nm and a BA560-600 nm emission filter, while the green florescence of Bacillus cells were visualized in 488 nm excitation wavelength with BA505-525 nm emission filter. Transmitted light images were obtained using Nomarski differential interference contrast (DIC).

[0332] According to the confocal images demonstrated in FIGS. 11A-B, a massive reduction in Salmonella cells was detected on the root in the presence of Bacillus cells. This result indicates that the colonization of the root by Bacillus cells and subsequent biofilm formation can trigger the anti-microbial activity against Salmonella.

### Example 5

### Growth of BX77 in Medicago sativa Extract Increase BX77 Antimicrobial Activity

[0333] Since BX77 displays antagonistic activity when grown in seedlings of Medicago sativa plants, the effect of the plant's extract to facilitate antimicrobial activity of the bacteria was tested. Antimicrobial activity of BX77 was tested on agar plate prepared with a sterile 4 day old seedling extract, supplemented with 1.5% agar. The extract was prepared by crushing the seedlings (1 g in 9 ml sterile water) in a stomacher for 2 minutes and removal of suspended particles by centrifugation and filtration through a 0.22 μm membrane. The final extract was sterilized by autoclaving. The anti-microbial activity of BX77 and a laboratory B. subtilis 3610 strain was tested in a rich medium (L_B) and in the plant extract agar against Salmonella folloxwing 24 h, at 25° C. (FIG. 12). Both strains inhibited the growth of Salmonella; however, the growth of BX77 and its inhibition zone was much higher than that of the B. subtilis 3610 strain. These findings indicate that the Medicago sativa extract contains factor(s) that enhance the growth of BX77 and/or induce antibacterial activity thereof.

### Example 6

### Effect of Antimicrobials Secreted During Growth of BX77 on Salmonella

[0334] In order to study the effect of the antimicrobials secreted by BX77 on Salmonella. BX77 was grown in Medicago sativa plant extract for 72 h at 25° C. and conditioned medium (CM) was prepared from the culture medium. Briefly, bacteria were removed by centrifugation and filtered and the medium was heat-sterilized. Salmonella (10⁴ CFU/ml) was added to the CM or to a sterile Medicago sativa plant extract and incubated for 24 h, at 24° C. The concentration of Salmonella steadily increased with time in the plant's extract, while in the presence of CM, the concentration of Salmonella steadily decreased (FIG. 13A).

[0335] To test if similar factors exist in additional plants, a plant extract from 4-days old Vigna radiate seedlings was prepared. Salmonella (10⁴ CFU/nil) was added to a sterile plant extract, with or without BX77 (10⁷ CFU/ml) and incubated for 24 h at 25° C. The effect of both M. sative and V. radiate extracts, and their respective conditioned media had a similar effect on Salmonella (FIG. 13B), suggesting that extracts from both plants induce the secretion of antimicrobial agents.

[0336] Treatment of the M. sative CM prepared following incubation of BX77 for 24 h at 25° C., with proteinase K did not affect the activity of the CM (data not shown), suggesting that the antimicrobial(s) is resistant to protein degradation. The heat-sterilization of the CM suggest that the active compounds are resistant to heat (up to 121° C.).

### Example 7

### Dynamics of BX77 Sporulation and Secretion of Antimicrobial Metabolites

[0337] In order to study the kinetics of the generation and secretion of the antimicrobial agent, BX77 was grown for 72 h at 25° C. in M. sative extract and samples from the culture were collected at different time points. Each sample was tested for the presence of sporulated bacteria and used to prepare a conditioned medium (CM). The antimicrobial activity of each CM sample was also tested following addition of Salmonella (10⁴ CFU/ml), and incubation for another 24 hours at 25° C. The number of endospores and the effect of CM, derived from different growth times, on Salmonella counts are present in FIG. 14A and FIG. 14B. Substantial activity of antimicrobials appeared at 24 h and maximal activity was demonstrated at 48 and 72 h. A representative microscopic image showing a high abundance of endospores at 48 h, in the plant-extract culture, is presented in FIG. 14C.

### Example 8

### BX77 has a Broad-Rage Antimicrobial Activity

[0338] The activity of BX77 strain was tested on agar plates against several bacterial and fungal pathogens as well as against human pathogens and spoilage bacteria (FIG. 15). BX77 strain was found to be highly active against the tested bacterial and fungal phytopathogens. Aspergillus flavus Fusarium proliferatu and Pencillium expansum.

[0339] BX77 was also active against the food/beverages-spoilage bacterium Alicyclobacillus acidoterrestris as well as against the foodborne pathogen, Bacillus cereus. In contrast, BX77 was inactive against Pseudomonas aeruginosa.

[0340] BX-77 was also found to inhibit the growth of Pseudomonas syringae, Pectobacterium carotovorum and Clavibacter michiganensis, three plant pathogens. BX-77 highly inhibited also the growth of Bacillus cereus, Listeria innocua, Pseudomonas fluorescence and Alicyclobacillus acidiphilus.

[0341] The results are summarized in Table 3, herein below.

TABLE 3

| | | Inhibition zone |
|---|---|---|
| Bacterial species | Origin | (mm) |
| S. Typhimurium (SL1344) | Human pathogen | 15 ± 2 |
| E. coli O55:H7 | Human pathogen | 15 ± 2 |
| Pseudomonas aeruginosa | Human | — |
| Staphylococcus aureus | Human pathogen | 19 ± 2 |
| Bacillus cereus | Human pathogen | 22 ± 2 |
| Listeria innocua | Environment | 14 ± 2 |
| Pseudomonas fluoresence | Environment | 25 ± 2 |
| Alicyclobacillus acidiphilus | Spoilage | 22 ± 2 |
| | bacterium | |
| Pseudomonas syringae | Plant pathogen | 18 ± 3 |
| Pectobacterium carotovorum | Plant pathogen | 15 ± 2 |
| Clavibacter michiganensis | Plant pathogen | 24 ± 3 |

### Example 9

### Bacillus BX77 Inhibits the Colonization of Salmonella on Germinated Medicago sativa Seeds

[0342] To investigate if BX77 can be used as a biocontrol agent to inhibit growth of Salmonella on plants, Medicago sativa seeds were artificially contaminated with a low inoculum of S. enterica serovar Typhimurium (10⁶ CFU/g) expressing the fluorescent mCherry protein and the seeds placed in a mini-sprouter containing sterile water enriched with BX77 cells (10⁷ CFU/ml) for 4 days at 25° C. Seeds germinated on BX77-free water served as a control. The presence of Salmonella on the young seedlings at 4 days was examined by confocal microscopy (FIG. 16). Non-treated seeds show the Salmonella cells (red fluorescence) in various regions of the seedling, while in BX77-treated seeds, no fluorescence was observed suggesting that BX77 inhibits Salmonella colonization on the growing seedlings.

### Example 10

### BX77 Expresses Known Genes Associated with Antimicrobial Activity at 48 h but not at 24 h

[0343] Potential expression of selected antimicrobial agents in BX77 was tested by PCR analysis of known genes involved in the synthesis of antimicrobial agents in Bacillus. The details of the genes and primer sequences are set forth in Table 4.

TABLE 4

| Gene | Antimicrobial | Sequence |
|---|---|---|
| fen | Fengycin | Fwd:-5′-CCGCAGCAGGTCGTATTAAA-3′ (SEQ ID |
| | | NO: 4) |
| | | Rev:-5′-GGTCTCTTCGTTTGGCTTCT-3 (SEQ ID NO: |
| | | 5) |
| diffD | Difficidin | Fwd:-5′-CGT GTG CCG AAG GAG AAA TA-3′ (SEQ |
| | | ID NO: 6) |
| | | REV:-5′-CGA ATC GTA CAG ACG GGA AAT-3′ |
| | | (SEQ ID NO: 7) |
| macL | Macrolactin | FWD:-5′-GCG GGC ATT ACG AAA GTT ATT C-3′ |
| | | (SEQ ID NO: 8) |
| | | REV:-5′-GGC ACT GTC CGG TAC ATA AA-3 (SEQ |
| | | ID NO: 9) |
| bacL | Bacillaene | FWD CGA TGG CCA ATG CGT TTA TG (SEQ ID NO: |
| | | 10) |
| | | REV ATG CAG CCG TCT TTC CAA (SEQ ID NO: 11) |
| butN | Butracin | FWD 5′-CAG GTG AAG CTG TTT GGA ATG-3′ |
| | | (SEQ ID NO: 12) |
| | | REV 5′-CAG GCG ATT TGA CCG TAT CT-3′ (SEQ |
| | | ID NO: 13) |
| srfA | Surfactin | FWD 5′-CGGTATGAGTCGATGAGAATCC-3′ (SEQ |
| | | ID NO: 14) |
| | | REV 5′-CTGATATCTGTGTGCCCGATAG-3′ (SEQ ID |
| | | NO: 15) |
| bacE | Bacilysin | Fwd 5′-TTCTCCCGAAAGGCGAATATC-3′ (SEQ ID |
| | | NO: 16) |
| | | Rev 5′-CCGCTTCTAAAGACGACATGA-3 (SEQ ID |
| | | NO: 17) |
| bmyA | Bacillomycin | Fwd 5′-GAATTCTGGCGGCTAAGG-3′ (SEQ ID NO: |
| | D | 18) |
| | | Rev 5′-GGAAGGAAGTGCTCGGAATAA-3 (SEQ ID |
| | | NO: 19) |

[0344] qPCR was performed on mRNA templates derived from BX77 culture grown in LB or in plant-extract for up to 72 h at 25° C. Gene expression is presented as a relative expression where expression in LB broth is considered 1.0 (FIG. 17). The expression of the bmyA, bacE and diifD genes increase at 24 h and continue till 36 h where bmyA is expressed 100-folds higher than in LB-medium. A high expression is seen also in the bacE, fen, srf and macL genes, while expression of the diffD remain at the same level as at 24 h. Interestingly, the expression of all these genes decrease at 48 and 72 h, where BX77 expresses its maximum antimicrobial activity (FIG. 17).

### Example 11

### Materials and Methods

[0345] Seed sterilization by Ca-hypochlorite: To assess the ability of Ca-hypochlorite to inactivate the Salmonella enterica serovar Typhimurium (STm) strain SL1344 on the seeds, alfalfa seeds were pre-contaminated with increasing concentrations of STm cells. Breifly, seeds (1 g) 15 were contaminated with the desired number of bacteria by adding 20 μL of STm suspended in SDDW and mixing by a sterile plastic spreader and then the seeds were dried at room-temp for 30 minutes. Contaminated seeds were disinfected by soaking the seeds in 5 ml of 20,000 ppm Ca-hypochlorite (Lonza, Arch Chemicals, Inc., Norwalk, CT) for 30 minutes, while occasionally hand shaking the tubes. The seeds were washed 5 times with 10 ml sterile tap water while mixing, then spread over the Whatman paper in the inner cup of the sprouter and were grown as described above. After 4 days the alfalfa sprouts were extracted and the STm concentration in the extract was analyzed. Salmonella Typhimurium SL1344 survival in sprouts in the presence or absence of Bacillus BX-77 was analyzed after disinfection by Ca-hypochlorite of alfalfa seeds contaminated by 10² or 10⁵ CFU of STm.

### Results

[0346] Efficiency of Decontamination of Salmonella on Alfalfa Seeds by Ca-Hypochlorite

[0347] Alfalfa seeds were contaminated with Salmonella by dipping in 10²-109 CFU/ml. The efficiency of decontamination by Ca-hypochlorite and the influence on the concentration of Salmonella was analyzed. The number of Salmonella on the seeds (CFU/g seeds) was detected immediately after the contamination and in the sprouts after 3 days of sprouting (FIGS. 18A-B).

[0348] The decontamination of the seeds was efficient after infection by low Salmonella concentrations up to 10³/ml and Salmonella was not detected even after sprouting. On the other hand when the concentrations were higher, the decontamination was not efficient as detected in also in 3 day sprouts.

[0349] Alfalfa seeds were infected by 10² or 10⁵ CFU of Salmonella, dried, disinfected by Ca-hypochlorite and seeded in the presence or absence of BX-77. Salmonella infected seeds were used as controls in the absence or the presence of BX-77. As illustrated in FIG. 19, the salmonella growth of the control samples on the left set increased from 2 logs CFU/g to about 8 log CFU/g. Addition of BX-77 reduced the growth by 4.2 log CFU/g. Disinfection with Ca-hypochlorite with or without BX-77 killed all the Salmonella cells. The Salmonella growth of the control samples on the right set increased from 5 logs CFU/g to about 9.3 log CFU/g. Addition of BX-77 reduced the growth by 2.4 log CFU/g only. Disinfection with Ca-hypochlorite reduced the growth by 2 log CFU/g and disinfection with Ca-hypochlorite and treatment with BX-77, resulted in reduction of the Salmonella cells by 7.8 logs CFU/g. With high concentration of salmonella, BX-77 or Ca-hypochlorite had low effect on killing salmonella, but together there was synergistic effect and they caused reduction of salmonella by about 8 logs CFU/g. Sprouts from seeds that were treated with Ca-hypochlorite and sprouted, with or without BX-77 also grew better.

### Example 12

### Anti-E. coli Activity in Sprouted Alfalfa Seeds

[0350] Alfalfa seeds contaminated with E. coli 055:H7 (100 CFU/g) were sprouted as described above in the presence or absence of individual Bacillus strains at a concentration of 10⁷ CFU/ml. In the absence of Bacillus strain, the E. coli reached about 4 log CFU/g after 4 days of sprouting, compared to Salmonella, which reached 8 log CFU/g. BX-77 strain completely inhibited the growth of E. coli.

### Example 13

[0351] BX-77 Strain is Active Against Multiple Salmonella Serovars

[0352] Growth inhibition activity of BX-77 was measured against Salmonella serovars other than Typhimurium (S. Infantis, S. Enteritidis, S. Virchow and S. Hadar), using the zone inhibition assay as well as in sprouted seeds. In both methods, BX-77 had growth inhibition activity against the serovars analysed.

[0353] Although the invention has been described in conjunction with specific embodiments thereof, it is evident that many alternatives, modifications and variations will be apparent to those skilled in the art. Accordingly, it is intended to embrace all such alternatives, modifications and variations that fall within the spirit and broad scope of the appended claims.

[0354] It is the intent of the applicant(s) that all publications, patents and patent applications referred to in this specification are to be incorporated in their entirety by reference into the specification, as if each individual publication, patent or patent application was specifically and individually noted when referenced that it is to be incorporated herein by reference. In addition, citation or identification of any reference in this application shall not be construed as an admission that such reference is available as prior art to the present invention. To the extent that section headings are used, they should not be construed as necessarily limiting. In addition, any priority document(s) of this application is/are hereby incorporated herein by reference in its/their entirety.

What is claimed is:

1. A method of generating an antimicrobial agent comprising:
(a) culturing Bacillus cells of the species subtilis or velezensis in a medium under conditions effective to allow secretion of at least one antimicrobial agent into the medium; and
(b) purifying said at least one antimicrobial agent from the medium to generate a purified preparation comprising said at least one antimicrobial agent, thereby generating the antimicrobial agent.

2. The method of claim 1, further comprising testing the activity of the antimicrobial agent.

3. The method of claim 1, wherein said Bacillus cells are of the species subtilis.

4. The method of claim 3, wherein said conditions support generation of a biofilm of said Bacillus subtilis cells or enhance secretion of a pigment secreted from said Bacillus subtilis cells.

5. The method of claim 1, wherein said purifying is effected by size exclusion or by reverse phase column chromatography.

6. The method of claim 1, wherein said antimicrobial agent is an antibacterial agent which is bactericidal towards at least one of the bacteria selected from the group consisting of E. coli, Salmonella Enterica, Staphylococcus aureus, Staphylococcus epidermidis and Bacillus cereus.

7. The method of claim 1, wherein said Bacillus velezensis has a 16S rRNA sequence as set forth in SEQ ID NO: 1.

8. A composition of matter comprising at least one antimicrobial agent generated according to the method of claim 1.

9. A composition of matter comprising at least one antimicrobial agent secreted from a Bacillus bacteria of the species subtilis or velezensis, wherein said at least one antimicrobial agent is more than 1% of the Bacillus components in the composition of matter.

10. A method of treating an infection in a subject in need thereof, the method comprising administering to the subject a therapeutically effective amount of the composition of generated according to the method of claim 1, thereby treating the infection.

11. The method of claim 10, wherein the infection is a bacterial infection.

12. The method of claim 10, wherein the bacterial infection is selected from the group consisting of an E. coli infection, a Salmonella Enterica infection, a Staphylococcus aureus infection, a Staphylococcus epidermidis infection and a Bacillus cereus infection.

13. A method of treating an infection in a subject in need thereof, the method comprising administering to the subject a therapeutically effective amount of the composition of claim 9, thereby treating the infection.

14. The method of claim 13, wherein the infection is a bacterial infection.

15. The method of claim 13, wherein the bacterial infection is selected from the group consisting of an E. coli infection, a Salmonella Enterica infection, a Staphylococcus aureus infection, a Staphylococcus epidermidis infection and a Bacillus cereus infection.

16. A bacterial culture comprising Bacillus bacteria of the species subtilis or velezensis and a heterologous plant which promotes antimicrobial activity of said Bacillus bacteria.

17. The bacterial culture of claim 16, wherein said plant is a sprout.

18. The bacterial culture of claim 17 wherein said sprout is a Medicago sativa sprout or a Vigna radiate sprout.

19. A method for prolonging the shelf life of a plant or the post-harvest quality of a plant, or a combination thereof comprising post-harvest contacting said plant with an effective amount of Bacillus bacteria of the species subtilis or velezensis, thereby prolonging the shelf life of a plant or the post-harvest quality of a plant, or a combination thereof.

20. The method of claim 19, wherein said Bacillus bacteria has a 16S rRNA sequence as set forth in SEQ ID NO: 1.

The application's sequence listing, which the Patent Office published only in electronic form, follows.

SEQUENCE LISTING (20 sequences)

SEQ ID NO: 1 - DNA, 1369 bp, Bacillus sp.
  misc_feature 1..1369: note = 16S rRNA sequence
  source 1..1369: mol_type = genomic DNA
tgaaccgcatggttcagacataaaaggtggcttcggctaccacttacagatggacccgcggcgcattagctagttggtgaggtaacggctcaccaaggcgacgatgcgtagccgacctgagagggtgatcggccacactgggactgagacacggcccagactcctacgggaggcagcagtagggaatcttccgcaatggacgaaagtctgacggagcaacgccgcgtgagtgatgaaggttttcggatcgtaaagctctgttgttagggaagaacaagtgccgttcaaatagggcggcaccttgacggtacctaaccagaaagccacggctaactacgtgccagcagccgcggtaatacgtaggtggcaagcgttgtccggaattattgggcgtaaagggctcgcaggcggtttcttaagtctgatgtgaaagcccccggctcaaccggggagggtcattggaaactggggaacttgagtgcagaagaggagagtggaattccacgtgtagcggtgaaatgcgtagagatgtggaggaacaccagtggcgaaggcgactctctggtctgtaactgacgctgaggagcgaaagcgtggggagcgaacaggattagataccctggtagtccacgccgtaaacgatgagtgctaagtgttagggggtttccgccccttagtgctgcagctaacgcattaagcactccgcctggggagtacggtcgcaagactgaaactcaaaggaattgacgggggcccgcacaagcggtggagcatgtggtttaattcgaagcaacgcgaagaaccttaccaggtcttgacatcctctgacaatcctagagataggacgtccccttcgggggcagagtgacaggtggtgcatggttgtcgtcagctcgtgtcgtgagatgttgggttaagtcccgcaacgagcgcaacccttgatcttagttgccagcattcagttgggcactctaaggtgactgccggtgacaaaccggaggaaggtggggatgacgtcaaatcatcatgccccttatgacctgggctacacacgtgctacaatggrcagaacaaagggcagcgaaaccgcgaggttaagccaatcccacaaatctgttctcagttcggatcgcagtctgcaactcgactgcgtgaagctggaatcgctagtaatcgcggatcagcatgccgcggtgaatacgttcccgggccttgtacacaccgcccgtcacaccacgagagtttgtaacacccgaagtcggtgaggtaacctttatggagccagccgccgaaggtgggacagatgattggggtgaagtcgtaacaaggtagccgtatcggaaggtgcggctggatcacctcctttcta

SEQ ID NO: 2 - DNA, 4215607 bp, Bacillus subtilis (residues 1-2,107,804 of 4,215,607)
  source 1..4215607: mol_type = genomic DNA
aattcaaacaatttgcccctaaaatcacgcatgtggatatctttttcggctttttttagtatccacagaggttatcgacaacattttcacattaccaacccctgtggacaaggttttttcaacaggttgtccgctttgtggataagattgtgacaaccattgcaagctctcgtttattttggtattatatttgtgttttaactcttgattactaatcctacctttcctctttatccacaaagtgtggataagttgtggattgatttcacacagcttgtgtagaaggttgtccacaagttgtgaaatttgtcgaaaagctatttatctactatattatatgttttcaacatttaatgtgtacgaatggtaagcgccatttgctctttttttgtgttctataacagagaaagacgccattttctaagaaaaggagggacgtgccggaagatggaaaatatattagacctgtggaaccaagcccttgctcaaatcgaaaaaaagttgagcaaaccgagttttgagacttggatgaagtcaaccaaagcccactcactgcaaggcgatacattaacaatcacggctcccaatgaatttgccagagactggctggagtccagatacttgcatctgattgcagatactatatatgaattaaccggggaagaattgagcattaagtttgtcattcctcaaaatcaagatgttgaggactttatgccgaaaccgcaagtcaaaaaagcggtcaaagaagatacatctgattttcctcaaaatatgctcaatccaaaatatacttttgatacttttgtcatcggatctggaaaccgatttgcacatgctgcttccctcgcagtagcggaagcgcccgcgaaagcttacaaccctttatttatctatgggggcgtcggcttagggaaaacacacttaatgcatgcgatcggccattatgtaatagatcataatccttctgccaaagtggtttatctgtcttctgagaaatttacaaacgaattcatcaactctatccgagataataaagccgtcgacttccgcaatcgctatcgaaatgttgatgtgcttttgatagatgatattcaatttttagcggggaaagaacaaacccaggaagaatttttccatacatttaacacattacacgaagaaagcaaacaaatcgtcatttcaagtgaccggccgccaaaggaaattccgacacttgaagacagattgcgctcacgttttgaatggggacttattacagatatcacaccgcctgatctagaaacgagaattgcaattttaagaaaaaaggccaaagcagagggcctcgatattccgaacgaggttatgctttacatcgcgaatcaaatcgacagcaatattcgggaactcgaaggagcattaatcagagttgtcgcttattcatctttaattaataaagatattaatgctgatctggccgctgaggcgttgaaagatattattccttcctcaaaaccgaaagtcattacgataaaagaaattcagagggtagtaggccagcaatttaatattaaactcgaggatttcaaagcaaaaaaacggacaaagtcagtagcttttccgcgtcaaatcgccatgtacttatcaagggaaatgactgattcctctcttcctaaaatcggtgaagagtttggaggacgtgatcatacgaccgttattcatgcgcatgaaaaaatttcaaaactgctggcagatgatgaacagcttcagcagcatgtaaaagaaattaaagaacagcttaaatagcaggaccggggatcaatcggggaaagtgtgaataacttttcggaagtcatacacagtctgtccacatgtggataggctgtgtttcctgtctttttcacaacttatccacaaatccacaggccctactattacttctactattttttataaatatatatattaatacattatccgttaggaggataaaaatgaaattcacgattcaaaaagatcgtcttgttgaaagtgtccaagatgtattaaaagcagtttcatccagaaccacgattcccattctgactggtattaaaattgttgcatcagatgatggagtatcctttacagggagtgactcagatatttctattgaatccttcattccaaaagaagaaggagataaagaaatcgtcactattgaacagcccggaagcatcgttttacaggctcgcttttttagtgaaattgtaaaaaaattgccgatggcaactgtagaaattgaagtccaaaatcagtatttgacgattatccgttctggtaaagctgaatttaatctaaacggactggatgctgatgaatatccgcacttgccgcagattgaagagcatcatgcgattcagatcccaactgatttgttaaaaaatctaatcagacaaacagtatttgcagtgtccacctcagaaacacgccctatcttgacaggtgtaaactggaaagtggagcaaagtgaattattatgcactgcaacggatagccaccgtcttgcattaagaaaggcgaaacttgatattccagaagacagatcttataacgtcgtgattccgggaaaaagtttaactgaactcagcaagattttagatgacaaccaggaacttgtagatatcgtcatcacagaaacccaagttctgtttaaagcgaaaaacgtcttgttcttctcacggcttctggacgggaattatccagacacaaccagcctgattccgcaagacagcaaaacagaaatcattgtgaacacaaaagaattccttcaggccattgatcgtgcatctcttttagctagagagggacgcaacaacgttgtaaaactgtccgcaaaaccggctgaatccattgaaatttcttccaattcgccagaaatcggtaaagttgtggaagcaattgttgcggatcaaattgaaggtgaggaattaaatatctcttttagtccaaaatatatgctggatgcactaaaggtgcttgaaggagcagaaatacgcgtaagctttacaggcgcaatgagacctttcttaattcgcacgccgaatgatgaaacgattgtacagcttatccttcctgtcagaacctattaatccgatacactgctgccgacccgtcggcagcttttctattcggtatctgctccgacaagttttccctttccctaattcgtttttttttagtacaattagatattagtgatatttgaaagaggtcgatataatggcaaatccgatttcaattgatacagagatgattacactcggacaattcttaaaattagccgatgtgattcagtctggcggtatggcgaagtggtttttaagcgagcatgaagtgcttgtgaacgatgagccggacaaccgccggggcagaaagctgtatgttggagatgtggtagagattgaaggatttggttcatttcaagtcgtcaattaaagcgggtgacactgattgtatatccagaacttagaactgacatcttaccgcaactacgaccatgctgaacttcaatttgaaaataaagtaaatgtgatcatcggagaaaacgcccaggggaagacaaacctcatggaggcgatctatgtcttgtccatggcgaaatcgcaccggacatcaaatgacaaagaacttatacggtgggacaaagactatgctaaaatagagggaagagtgatgaagcaaaacggggcgatcccgatgcagctcgtcatctccaaaaagggtaaaaagggcaaggtcaatcatattgaacagcaaaagctcagccagtatgtcggggccctcaacaccattatgttcgcgccggaagatttaaatcttgtaaagggaagccctcaagtgagaaggcggtttcttgacatggaaatcggacaggtttctcccgtctaccttcatgatctttctctttaccagaaaatcctttcccagcggaatcattttttgaaacagctgcaaacaagaaaacaaactgaccggacgatgctcgatgttctgaccgatcagcttgtagaagttgcagcaaaagtcgtcgtaaaacgcctgcagtttacagcacagctcgagaaatgggcgcagcccatccatgcaggcatctcaagagggcttgaagaactgaccctgaaataccatacagctcttgatgtatcagatcccctagatttgtcgaaaataggagatagctatcaagaagcgttttctaaattaagagaaaaagaaattgagcgtggtgtgacgctgtcagggcctcatcgcgatgatgttcttttctatgtgaacggacgcgatgtgcagacgtatggttctcaaggacagcagcgaacgacggcgttgtcccttaagctggcggagattgacctgatccatgaagaaatcggagaatatcccattttactattggatgatgtactgagtgaactggatgattatcgccagtcacacttgcttcatacgatccaaggccgtgtacaaacgtttgtcacaacgacaagcgttgatggcattgatcacgaaaccttacgtcaagcaggaatgttccgtgtgcaaaatggtgcgttagtgaagtgaagaaatgaggtgagcaattgtatattcatttaggtgatgactttgtggtttcaacacgagatattgtcggcatttttgactttaaagccaacatgtcgcctattgttgaagaatttctgaaaaaacagaaacacaaggtggtgccttccgtaaacggcacgcccaaatctatcgtagtcacggttcagaatatatattactctcccttatcttccagcacattaaaaaaacgtgcgcaatttatgtttgaaatagattcttagaaattttttatcacgaatatatcgtttagaaaagtgtaggtgaatgacgtggctatggaacagcagcaaaacagttatgatgaaaatcagatacaggtactagaaggattggaagctgttcgtaaaagaccggggatgtatatcggttcgacaaacagcaaaggccttcaccacttggtatgggaaattgtcgacaatagtattgacgaagccctcgccggttattgtacggatatcaatatccaaatcgaaaaagacaacagtatcacggttgtagataatggccgcggtattccagtcggtattcatgaaaaaatgggccgtcctgcggtagaagtcattatgacggtgcttcatgccggaggaaaatttgacggaagcggctataaagtatccggaggattacacggtgtaggtgcgtcggtcgtaaacgcactatcaacagagcttgatgtgacggttcaccgtgacggtaaaattcaccgccaaacctataaacgcggagttccggttacagaccttgaaatcattggcgaaacggatcatacaggaacgacgacacattttgtcccggaccctgaaattttctcagaaacaaccgagtatgattacgatctgcttgccaaccgcgtgcgtgaattagcctttttaacaaagggcgtaaacatcacgattgaagataaacgtgaaggacaagagcgcaaaaatgaataccattacgaaggcggaattaaaagttatgtagagtatttaaaccgctctaaagaggttgtccatgaagagccgatttacattgaaggcgaaaaggacggcattacggttgaagtggctttgcaatacaatgacagctacacaagcaacatttactcgtttacaaacaacattaacacgtacgaaggcggtacccatgaagctggcttcaaaacgggcctgactcgtgttatcaacgattacgccagaaaaaaagggcttattaaagaaaatgatccaaacctaagcggagatgacgtaagggaagggctgacagcgattatttcaatcaaacaccctgatccgcagtttgagggccaaacaaaaacaaagctgggcaactcagaagcacggacgatcaccgatacgttattttctacggcgatggaaacatttatgctggaaaatccagatgcagccaaaaaaattgtcgataaaggtttaatggcggcaagagcaagaatggctgcgaaaaaagcgcgtgaactaacacgccgtaagagtgctttggaaatttcaaacctgcccggtaagttagcggactgctcttcaaaagatccgagcatctccgagttatatatcgtagagggtgactctgccggaggatctgctaaacaaggacgcgacagacatttccaagccattttgccgcttagaggtaaaatcctaaacgttgaaaaggccagactggataaaatcctttctaacaacgaagttcgctctatgatcacagcgctcggcacaggtatcggagaagacttcaaccttgagaaagcccgttaccacaaagttgtcattatgacagatgccgatgttgacggcgcgcacatcagaacactgctgttaacgttcttttacagatatatgcgccaaattatcgaaaatggctacgtgtacattgcgcagccgccgctctacaaggttcaacaggggaaacgcgttgaatatgcatacaatgacaaggagcttgaagagctgttaaaaactcttcctcaaacgcctaagcctggactgcagcgttacaaaggtcttggtgaaatgaatgccacccagctatgggagacaaccatggatcctagctccagaacacttcttcaggtaactcttgaagatgcaatggatgcggatgagacttttgaaatgcttatgggcgacaaggtagaaccgcgccgaaacttcatagaagcgaatgcgagatacgttaaaaatcttgacatctaatcataaaaagccttatttccaataagaaataaggcttttttctgaacaagatcagatgcagcgatgcctgcaatacctatatattctagcaatttaatgtgtataatcataagtttattgatataatggagaatagtgaaatcgtattgaaggtcataatggacaatctactcccacatatttcatgtgatacttcagggaggttttttaatgagtgaacaaaacacaccacaagttcgtgaaataaatatcagtcaggaaatgcgtacgtccttcttggattatgcaatgagcgttatcgtgtcccgtgctcttccggatgttcgtgacggtttaaaaccggttcatagacggattttgtatgcaatgaatgatttaggcatgacaagtgacaagccttataaaaaatccgcgcgtatcgttggagaagttatcgggaaataccacccgcacggtgattcagcggtatatgaatccatggtcagaatggctcaggatttcaactaccgttatatgctcgttgacggtcacggaaacttcggttctgttgacggagactcagcggcggccatgcgttatacagaagcacgaatgtctaaaatctcaatggagattcttcgcgacatcacaaaagacacaatcgattaccaggataactatgacgggtcagaaagagaacctgtcgttatgccttcaaggttcccgaatctgctcgtgaacggtgctgccggcattgcggtaggtatggcaacaaacattcctccgcaccagctgggagaaatcattgacggtgtacttgctgttagtgagaatccggacattacaattccagagcttatggaagtcattccagggcctgatttcccgaccgcgggtcaaatcttgggacgcagcggtatccggaaagcatacgaatcaggccgaggctctatcacgatccgggcaaaagctgagatcgaacaaacatcttcgggtaaagaaagaattatcgttacagagttaccttaccaagtaaataaggcgaaattaattgagaaaattgctgatctcgtaagggacaaaaagatagagggtatcacagatctgcgtgatgagtcagatcgtacaggtatgagaattgtcattgaaatcagacgcgatgccaatgcgaatgttatcttaaacaatctgtacaaacaaactgctctacaaacatcttttggcatcaacctgcttgcgcttgttgatggccagccgaaagttttaactcttaagcaatgcctggagcattaccttgaccatcaaaaagttgtcattagacgccgtactgcttatgaattgcgtaaagcagaagcgagagctcatatcttggaaggattgagagttgcactggatcatctcgatgcagttatctcccttatccgtaattctcaaacggctgaaattgcgagaacaggtttaattgaacaattctcactgacagagaagcaagcacaagcgatccttgacatgaggctccagcgtttaacgggactggaacgtgaaaagatcgaagaagaataccagtctcttgttaaattaattgcagagctaaaagacatcttggcaaatgaatataaagtgcttgagatcattcgtgaagaactcacggaaatcaaagagcgttttaacgatgaaagacgtactgagatcgtcacttctggactggagacaattgaagatgaagatctcatcgagagagaaaatatcgtagttactctgacgcacaacggatacgtcaaacgtcttcctgcatcaacttaccgcagtcaaaaacggggcggaaaaggtgtacaaggtatgggaacaaacgaagatgatttcgttgaacatttgatctctacgtcaactcatgacacgattctcttcttctcgaacaaggggaaagtgtatcgtgcaaaagggtatgaaatccctgaatacggcagaacggcaaaaggaatcccgattattaacctgctggaggtagaaaagggtgagtggatcaacgcgattattccagtcacggaattcaatgcggagctttacctcttcttcactacaaagcatggggtttcaaaacgaacatcgctatctcaattcgctaatatccgcaacaatggtctaattgctctgagtcttcgtgaagatgatgaactgatgggtgtacgtctgactgacggcacaaaacaaatcatcattggaacgaaaaacggtttactgattcgtttccctgaaacagatgtccgagagatgggaagaactgcggcgggcgtaaaaggcatcaccctgacggatgacgacgttgttgtcggcatggagattttagaggaagaatcacacgtccttatcgtaactgaaaaagggtacggaaaacgaactcctgctgaagagtacagaacccaaagccggggcggaaaaggactcaaaacagcgaaaatcaccgagaacaacggccaactagtagcagtgaaagctactaaaggtgaagaggatctaatgattattacagctagcggcgtactcatcagaatggacatcaatgatatctccatcaccggacgtgtcactcaaggtgtgcgtctcatcagaatggcagaagaagagcatgttgctacagtagctttagttgagaaaaacgaagaagatgagaatgaagaagaacaagaagaagtgtgaaaaaaagcgcagctgaaatagctgcgcttttttgtgtcataaccctttacagtcataaaaattatggtataatcatttctgttgtctttttaaagacacaagcatgaccattatgactagtaaaaactttttcaaaaaagtattgacctagttaactaaaaatgttactattaagtagtcgctttgagagaagcacacaaagttctttgaaaactaaacaagacaaaacgtacctgttaattcatttttataaatcgcacagcgatgtgcgtagtcagtcaaactagggcctgcacgacgcaggtcacacaggtgtcgccgcaggatgcggtgaacttaacctgtgatccatttatcggagagtttgatcctggctcaggacgaacgctggcggcgtgcctaatacatgcaagtcgagcggacagatgggagcttgctccctgatgttagcggcggacgggtgagtaacacgtgggtaacctgcctgtaagactgggataactccgggaaaccggggctaataccggatggttgtttgaaccgcatggttcaaacataaaaggtggcttcggctaccacttacagatggacccgcggcgcattagctagttggtgaggtaacggctcaccaaggcgacgatgcgtagccgacctgagagggtgatcggccacactgggactgagacacggcccagactcctacgggaggcagcagtagggaatcttccgcaatggacgaaagtctgacggagcaacgccgcgtgagtgatgaaggttttcggatcgtaaagctctgttgttagggaagaacaagtgccgttcgaatagggcggtaccttgacggtacctaaccagaaagccacggctaactacgtgccagcagccgcggtaatacgtaggtggcaagcgttgtccggaattattgggcgtaaagggctcgcaggcggtttcttaagtctgatgtgaaagcccccggctcaaccggggagggtcattggaaactggggaacttgagtgcagaagaggagagtggaattccacgtgtagcggtgaaatgcgtagagatgtggaggaacaccagtggcgaaggcgactctctggtctgtaactgacgctgaggagcgaaagcgtggggagcgaacaggattagataccctggtagtccacgccgtaaacgatgagtgctaagtgttagggggtttccgccccttagtgctgcagctaacgcattaagcactccgcctggggagtacggtcgcaagactgaaactcaaaggaattgacgggggcccgcacaagcggtggagcatgtggtttaattcgaagcaacgcgaagaaccttaccaggtcttgacatcctctgacaatcctagagataggacgtccccttcgggggcagagtgacaggtggtgcatggttgtcgtcagctcgtgtcgtgagatgttgggttaagtcccgcaacgagcgcaacccttgatcttagttgccagcattcagttgggcactctaaggtgactgccggtgacaaaccggaggaaggtggggatgacgtcaaatcatcatgccccttatgacctgggctacacacgtgctacaatggacagaacaaagggcagcgaaaccgcgaggttaagccaatcccacaaatctgttctcagttcggatcgcagtctgcaactcgactgcgtgaagctggaatcgctagtaatcgcggatcagcatgccgcggtgaatacgttcccgggccttgtacacaccgcccgtcacaccacgagagtttgtaacacccgaagtcggtgaggtaaccttttaggagccagccgccgaaggtgggacagatgattggggtgaagtcgtaacaaggtagccgtatcggaaggtgcggctggatcacctcctttctaaggatattttacggaatataagaccttgggtcttataaacagaacgttccctgtcttgtttagttttgaaggaactttgttccttgaataagttaagatgggcctgtagctcagctggttagagcgcacgcctgataagcgtgaggtcggtggttcgagtccactcaggcccaccatcttatataacggggccttagctcagctgggagagcgcctgctttgcacgcaggaggtcagcggttcgatcccgctaggctccaccaacgtgttctttgaaaactagataacagtagacatcacattcaattagtaacacaagatatcacatagtgattctttttaacggttaagttagaaagggcgcacggtggatgccttggcactaggagccgatgaaggacgggacgaacaccgatatgcttcggggagctgtaagcaagctttgatccggagatttccgaatggggaaacccaccactcgtaatggagtggtatccatatctgaattcataggatatgagaaggcagacccggggaactgaaacatctaagtacccggaggaagagaaagcaaatgcgattccctgagtagcggcgagcgaaacgggatcagcccaaaccaagaggcttgcctcttggggttgtaggacactctgtacggagttacaaaggaacgaggtagatgaagaggtctggaaaggcccgccataggaggtaacagccctgtagtcaaaacttcgttctctcctgagtggatcctgagtacggcggaacacgtgaaattccgtcggaatccgggaggaccatctcccaaggctaaatactccctagtgaccgatagtgaaccagtaccgtgagggaaaggtgaaaagcaccccggaaggggagtgaaagagatcctgaaaccgtgtgcctacaagtagtcagagcccgttaacgggtgatggcgtgccttttgtagaatgaaccggcgagttacgatctcgtgcaaggttaagcagaagatgcggagccgcagcgaaagcgagtctgaatagggcgcatgagtacgtggtcgtagacccgaaaccaggtgatctacccatgtccagggtgaagttcaggtaacactgaatggaggcccgaacccacgcacgttgaaaagtgcggggatgaggtgtgggtaggggtgaaatgccaatcgaacctggagatagctggttctctccgaaatagctttagggctagcctcaaggtaagagtcttggaggtagagcactgattggactaggggcccctaccgggttaccgaattcagtcaaactccgaatgccaatgacttatccttgggagtcagactgcgagtgataagatccgtagtcgaaagggaaacagcccagaccgccagctaaggtcccaaagtatacgttaagtggaaaaggatgtggagttgcttagacaaccaggatgttggcttagaagcagccaccatttaaagagtgcgtaatagctcactggtcgagtgactctgcgccgaaaatgtaccggggctaaacgtatcaccgaagctgcggactgttcttcgaacagtggtaggagagcgttctaagggctgtgaagccagaccggaaggactggtggagcgcttagaagtgagaatgccggtatgagtagcgaaagaggggtgagaatcccctccaccgaatgcctaaggtttcctgaggaaggctcgtccgctcagggttagtcgggacctaagccgaggccgaaaggcgtaggcgatggacaacaggttgatattcctgtaccacctcctcaccatttgagcaatggggggacgcaggaggatagggtaagcgcggtattggatatccgcgtccaagcagttaggctgggaaataggcaaatccgtttcccataaggctgagctgtgatggcgagcgaaatatagtagcgaagttcctgattccacactgccaagaaaagcctctagcgaggtgagaggtgcccgtaccgcaaaccgacacaggtaggcgaggagagaatcctaaggtgatcgagagaactctcgttaaggaactcggcaaaatgaccccgtaacttcgggagaaggggtgctctgttagggtgcaagcccgagagagccgcagtgaataggcccaggcgactgtttagcaaaaacacaggtctctgcgaagccgtaaggcgaagtataggggctgacgcctgcccggtgctggaaggttaagaggagcgcttagcgtaagcgaaggtgcgaattgaagccccagtaaacggcggccgtaactataacggtcctaaggtagcgaaattccttgtcgggtaagttccgacccgcacgaaaggcgcaacgatctgggcactgtctcaacgagagactcggtgaaattatagtacctgtgaagatgcaggttacccgcgacaggacggaaagaccccgtggagctttactgcagcctgatattgaatgttggtacagcttgtacaggataggtaggagccttggaaaccggagcgccagcttcggtggaggcatcggtgggatactaccctggctgtattgaccttctaacccgccgcccttatcgggcggggagacagtgtcaggtgggcagtttgactggggcggtcgcctcctaaaaggtaacggaggcgcccaaaggttccctcagaatggttggaaatcattcgcagagtgtaaaggcacaagggagcttgactgcgagacctacaagtcgagcagggacgaaagtcgggcttagtgatccggtggttccgcatggaagggccatcgctcaacggataaaagctaccccggggataacaggcttatctcccccaagagtccacatcgacggggaggtttggcacctcgatgtcggctcatcgcatcctggggctgtagtcggtcccaagggttgggctgttcgcccattaaagcggtacgcgagctgggttcagaacgtcgtgagacagttcggtccctatccgtcgcgggcgcaggaaatttgagaggagctgtccttagtacgagaggaccgggatggacgcaccgctggtgtaccagttgttctgccaagggcatcgctgggtagctatgtgcggacgggataagtgctgaaagcatctaagcatgaagcccccctcaagatgagatttcccattccgcaaggaagtaagatccctgaaagatgatcaggttgataggtctgaggtggaagtgtggcgacacatggagctgacagatactaatcgatcgaggacttaaccatatttttgaatgatgtcacacctgttatctagttttgagagaacactctcaatttgtttggtggcgatagcgaagaggtcacacccgttcccataccgaacacggaagttaagctcttcagcgccgatggtagtcgggggtttccccctgtgagagtaggacgccgccaagcaagcttaaacccagctcaatgagctgggttttttgtttgttaaaaatgaagaagaaactgtgaagcgtatttagggaatttcttttctgatactaataaaaactgctgaattaacacgtagtcatcacttatatgctgtgttaataactcataccaccattctgtttcataccttgcaatcatcccaacgttgtacaaaatcaaataatgaattgtcatttcgggaagcctcagaaattgctccctttgagaagggatataatattggttcttttccatgtcaaacaataagctggtcgatgtccatggctccttgtcttgtggtgaaatttcgaacagcagcccgtgttcatttttttttgtaaaagaccattgataatgatgggacatgtattcagcaaaccttgaatcagacattttgtaattgattactacttcctccggtacaaaaatttcgttcttatccttctcaacttttgtcataaatcgttctttctgctgaaagtagaaaatatcgctaagttctggaatggccattaataattttttcatggtataccgttcatctactatatccgattgtccgaataaatgtttcataaaatgtacgcataggccattccgttgtattttcacttcatcgtcgctaaaacaataattttgtttctttcgttttcttgttgttacgccatgtgccagtactgatgtatggcttggataatgaggatcacgtgtaattaagcatgctttgataagctgtgccattccataaaataaaagaatcggtttgatttctaagggagaatatgcggcttgtttataaaacgattcggcatgctttaagaaataaataaaccgttcactgtttttaaaagagttttttttcgcatcgttaataccgtttaagatataaaccttttctagaaatttctgggttgattcaacggagtaaaatagcgctaagtctttccactcatgatatgtcatgtatatttcttaatcctttccgttatctaaatatttcaactctttcccgcttccttgacatgctcttggctagttgataatctacatataatattttgccgaaaagagggggatttactaatgtgggaaagtaaattttcaaaagaaggcttaacgttcgacgatgtgctgcttgtaccagcaaagtctgaggtacttccgcgtgatgtggatttatctgtagaacttacaaaaacgttaaagctaaatattcctgtcatcagcgcaggtatggacactgtaacagaatcagcaatggcaattgcaatggcaagacagggcggcttgggcatcattcacaaaaatatgtccattgaacagcaggctgaacaagttgataaagtaaagcgttctgagcgcggcgttatcacaaatcccttctttttaactcctgatcaccaagtatttgatgcggagcatttgatggggaaatacagaatttccggtgttccgattgtaaataacgaagaagaccagaagcttgttggaattattacaaaccgtgaccttcgttttatttctgactactcaatgaaaatcagcgacgtcatgacgaaagaagagctagttactgcatctgtaggaactactctggatgaagctgaaaagattttgcagaaacataaaattgaaaagcttcctctcgtagatgaccagaataaattaaaaggtcttatcacaattaaagacattgaaaaagtcattgagttcccgaactcatctaaagacattcacggccgcctgatcgttggcgcggcagttggtgtaactggcgatacaatgactcgcgtcaaaaagcttgttgaagccaatgttgatgtgattgttatcgatacagctcacggacactctcaaggcgttttaaacacagtcacaaaaatccgtgaaacgtatcccgaattaaacattattgctggaaacgtggcaacagctgaagcgacaagagcgcttatcgaagctggagcagacgttgtcaaagttggaatagggcctggttcaatttgtactacacgtgttgtagccggcgtgggtgttccgcaaattacagcaatttatgattgtgcgactgaagcaagaaaacacggcaaaacaatcatcgccgacggtgggattaaattctctggcgatatcactaaagcattggcagccggcggacatgctgttatgctcggaagcttgcttgcaggcacatcagaaagccctggtgaaactgaaatctaccaaggcagaagatttaaggtataccgcggcatgggatcagttgctgcaatggaaaaaggaagtaaagaccgttacttccaagaagaaaacaaaaaatttgttcctgaaggaattgaaggacgcacaccttacaaagggccagttgaagaaaccgtttatcagctagtcggaggccttcgttctggtatggggtattgcgggtccaaagatctgcgtgcgctaagagaagaagctcagttcattcgcatgactggcgcaggacttcgcgaaagccatccgcatgacgtacagattacaaaagaatcacctaactatacaatttcataataaattgttacaaattaaaaacatttgacagggtctctgactctgtctattttttttatactgattatgataaaatttatactgttgtgcattgaaaatgtccttaacggcttaattatagatgaagaaaatgaaatacggaggtcgtacgattgaacatcaagaaatgtaaacagctactgatgtcattggttgtgttaactctagctgtcacgtgtctggctccaatgtcaaaagcgaaagcagccagcgatccaattgatatcaatgcatctgctgctattatgatcgaagcttcttcaggtaaaattctttacagtaaaaatgcagataagagactgccaattgcgagtatgacaaaaatgatgacagagtatctgttattggaagcaattgatcaaggtaaagtgaaatgggaccaaacctatacgcctgatgactatgtgtatgaaatttcccaagataacagcttatcaaacgttcctcttcggaaagacgggaaatacacagtaaaagaattatatcaagctacagcaatttattctgcaaatgctgctgctattgcgattgcagaaatcgttgccggttctgaaactaagtttgttgaaaaaatgaatgcaaaagcaaaagaactaggcttaacagattacaaatttgttaacgcaacaggtcttgaaaacaaagatcttcacgggcatcagcctgaggggacaagcgtaaatgaagaaagtgaagtttctgcaaaggatatggcggttcttgcggatcacttgattactgactaccctgagatactggagacttccagtatcgccaaaacgaaattcagagaaggcaccgatgatgaaatggacatgccgaactggaattttatgctgaaggggcttgtcagcgagtataaaaaagcgactgtagacggactgaaaacaggttctactgactctgcgggttcatgctttacaggaacagctgaacgcaacggtatgcgtgtcatcactgttgttttaaacgcaaagggcaaccttcatacaggccgtttcgatgaaacgaaaaaaatgtttgattatgctttcgacaatttctccatgaaagaaatttatgctgaaggcgatcaagtaaaaggccataaaacaatttcagttgataagggtaaagagaaagaagtaggcattgtgacaaacaaggcgttctctcttcctgtcaaaaatggtgaagaaaagaattacaaagcgaaggtcacactgaataaagacaacttaactgctcctgtgaaaaaaggaaccaaggttgggaagctgactgcggaatacacaggtgatgaaaaggattacggattccttaacagcgatctggctggcgtagaccttgttacaaaagaaaatgtagaaaaagcaaactggtttgttttgacaatgcgcagtatcggcggattttttgccggaatttggggaagcattgttgatacggtaaccggctggttttaatcaattgaaagagctctgatggatgttagggctctttcgcgtaatatactgaaaaaacccaatttttaataaaaaatgattttcaaagcgctaaaaaccgaataaaatagtatatatgcatatgaattattggatttctaggatacaataaggattagaaatcatataactataccttgattagggggaccaagaaatggctcaaacaggtactgaacgtgtaaaacgcggaatggcagaaatgcaaaaaggcggcgtcatcatggacgtcatcaatgcggaacaagcgaaaatcgctgaagaagctggagctgtcgctgtaatggcgctagaacgtgtgccagcagatattcgcgcggctggaggagttgcccgtatggctgaccctacaatcgtggaagaagtaatgaatgcagtatctatcccggtaatggcaaaagcgcgtatcggacatattgttgaagcgcgtgtgcttgaagctatgggtgttgactatattgatgaaagtgaagttctgacgccggctgacgaagaatttcatttaaataaaaatgaatacacagttccttttgtctgtggctgccgtgatcttggtgaagcaacacgccgtattgcggaaggtgcttctatgcttcgcacaaaaggtgagcctggaacaggtaatattgttgaggctgttcgccatatgcgtaaagttaacgctcaagtgcgcaaagtagttgcgatgagtgaggatgagctaatgacagaagcgaaaaacctaggtgctccttacgagcttcttcttcaaattaaaaaagacggcaagcttcctgtcgttaactttgccgctggcggcgtagcaactccagctgatgctgctctcatgatgcagcttggtgctgacggagtatttgttggttctggtatttttaaatcagacaaccctgctaaatttgcgaaagcaattgtggaagcaacaactcactttactgattacaaattaatcgctgagttgtcaaaagagcttggtactgcaatgaaagggattgaaatctcaaacttacttccagaacagcgtatgcaagaacgcggctggtaagaacataggagcgctgctgacatgttaacaataggtgtactaggacttcaaggagcagttagagagcacatccatgcgattgaagcatgcggcgcggctggtcttgtcgtaaaacgtccggagcagctgaacgaagttgacgggttgattttgccgggcggtgagagcacgacgatgcgccgtttgatcgatacgtatcaattcatggagccgcttcgtgaattcgctgctcagggcaaaccgatgtttggaacatgtgccggattaattatattagcaaaagaaattgccggttcagataatcctcatttaggtcttctgaatgtggttgtagaacgtaattcatttggccggcaggttgacagctttgaagctgatttaacaattaaaggcttggacgagccttttactggggtattcatccgtgctccgcatattttagaagctggtgaaaatgttgaagttctatcggagcataatggtcgtattgtagccgcgaaacaggggcaattccttggctgctcattccatccggagctgacagaagatcaccgagtgacgcagctgtttgttgaaatggttgaggaatataagcaaaaggcacttgtataaaacagttgaaagctgtggaaacttatagtacattataagcacaaataaagatcgaaaagcgttgataggaactagtagggagcctctctttctaagagagccgatggttggtgcgaatcggtgaaagatgctgtctgaatccatccttgagcgaaatgctgaagcgagtaggcatttacgggataaccgttatgtttgaaagtggaaaacgagtctttgatttgttttcaatcagggtggcaacgcgagagctctcgtccctttatggggatgagggctctttttattttcgataaatcaataaaaaaaggagtgtttcgcatgcttgatacgaaaatgctgagagcaaattttcaagaaattaaagcaaagcttgtacacaaaggcgaagacttaactgattttgataagtttgaggcgctggatgatagacgaagagagcttatcggcaaggttgaagagttaaaaggaaaacgaaatgaagtttctcagcaggttgctgtgctgaagcgtgagaaaaaagacgcggatcacattattaaagaaatgcgtgaagtcggcgaggaaattaaaaagctcgatgaagaattacggacagtggaagctgagcttgatacaatcctgctctcaatcccgaatattccgcatgagtctgtacctgtcggtgaaacagaagacgacaacgtagaagtgcgtaaatggggtgaaaagccttcatttgcttatgagccgaagccgcactgggatattgcggatgagctgggtattctggattttgaacgtgctgccaaagtaacaggaagccgtttcgtgttctataaaggcttaggtgctcgtctggagcgtgcgctttataactttatgcttgatctgcatgtggatgagtataactacactgaagtgatcccgccatatatggtaaaccgcgcaagcatgacgggaacggggcagcttcctaaatttgaagaggatgcatttaaaatcagagaagaagattatttcttaattccaacggcggaagtgccgattacaaacatgcatcgcgatgaaatcctttcaggtgacagcctgccgatcaactatgcggcattcagtgcttgcttccgttctgaagctggttcagcaggacgtgacacacgcggattaattcgtcagcaccaatttaataaagttgagcttgtaaagtttgtgaagcctgaagattcttatgaagaattagagaaacttacaaaccaagcagaacgggttcttcagctgcttgagcttccataccgtgtcatgagcatgtgtacgggtgacttaggctttacggctgcgaaaaaatacgatatcgaagtttggattccaagccaagacacatatcgagaaatctcttcttgcagcaacttcgaagcgttccaggcgagacgtgcgaatattcgtttcagacgtgaagcgaaaggcaagcctgagcatgtacacacactgaacggctcaggactggcggttggaagaacagttgctgctatcttagaaaattatcagcaggaagacggaagcgttgtgattccgaaagtgcttcgtccttatatggggaatagagaagtaatgaaaccgtaaattatggaaaggcgtgcctgacaaggtgcgcctttttgcttatgtaaacacggcattttcataaaaacaaaaaaagtttttaaaaatgcttgaccacacgagaacatacgtgatatagttagtcttgtcgatacggaggaatacccaagtccggctgaagggatcggtcttgaaaaccgacaggggtgtcaaagcccgcgggggttcgaatccctcttcctccgccatattgattttaattctaatgaaacacaagcatatattggagattgttttgtccgttgcattcggtgcggcggattttttattttaaagaaaaagtgaatctcgactgagattcactttttttgattatcatgaataactgaagcaatttgatctacaatattttcaatcgagttttcgtcgttcagaagatcataatcttcaatgcgaagttttaaaacagggcaggcattaaaaccgcttatccagttctcgtagcgtgtatgcatttcttcccaataagaccggcttgtctgaagctccatctcacggccgcgttgttcaatccggtttaaaatgttctccagatctccttctaaatagatcaacacatctggatgtgggaaatacggtgtcattaccattgcttcgaaaaggcttgtgtaagtcttataatcaacctttgacattgtccctttatcagcatgcatttttgcgaaaattcctgtatcttcataaatcgaacgatcctgtacaaaacctccgccggcttcaaaaattgttttctgttctttgaagcgttcagctaagaagtaaatttgaaggtgaaagctccaacgttcaaaatcatgatagaacttttccaaatatggattatgatcgacttcctccaacgatgttttaaatccaagccgtttagctaaagtttttgttaaagtcgattttccgacacctactgttcctgctactgtaataattgaattcttagggatatgatgttccttcatacgataagctcctttacatgggcggcaatgcgttcaaagtcgctcttattcaaaacgaaatcctttgaatcaccatctacggttaacactgtaagttcagggtctgcttcctgcagctgcttgatggcgacttcataatctgaaatcagctgctccaaatagctagtttcaatttttttctcaaaggggcgcccgcgtttttcaatgcggtgtagcaatgtaggcagactggcctttatgtaaatgatgaaattcggctttggcagatcatccgttagcaggtgatatatctttttgtatttttccagctgatgtggagacaaggttcgttccgcaaaaatcacatttttataaatatgataatcagctattacaggctgtcccttttttaaaaagtgatcactggtgtcttcaagctgtttgtatctgtgacaaagaaaaaacatctcgagctggaagctccattcctttatattgtcataaaacttatcaaggtacgggttatcctctacaatctcattgatcatagggaatccgaatttttgtgagagcatcgttgcgagagttgtttttcctgccccgataggaccttctattgcaataaaaggggctgtattcatcggaatcctccttatatctgaaaaacgtgcgtcagttaccgaccttcatattgtatcacaacccttgggtgcccccatgaaaaaaagacgtttccaaattatcgaaacgtctttttgacaacattaaattgatcagacagcagcagccagttttgtggaaaggaaagacccagcttccaatagctgatgcctcttaaattcagctctttaatcagattgaattttgcttgaatcgagcgggcatcctcgaaccatacctcgtgccttctgttttctgcatcagtatagcggaagaaaggagcttgagcggtttggtcatactgaatggaagcattgttctgatcagctatgacaatggcttgctgagggcttactgctcttgctggagttccccctgctgtatatggcagcgtccagtcatatccatataaattctggcccatgacaattttgttcgcaggcatttcagtcaaagcatattctatgacatcacggacaggtccaattggagaaaccgcttgaggcggtccgccgctatagccccattcatatgtcatgagaacaacaaagtcgacaatttcgccatgtgccctgtaatcatgagcttcataccacctgccctgctgtgttgcacttgttttaggagcaagagccgtagaaatttctaagccctctcgatggaaaagatcccttgcttcgcggaggaattgattataggcctctctatcctggggccgcaaatattcaaagtcgaaatgaatgtcacggaagccatatcttctggcattctcgactatttcatttagaagccgtctttttacagtttcgtcgttcaaaaggatccggccaagttcatcgctgaatgcctggttttctaggttcgttataatcatcatcaatgttgtattttgactttctgtaatgctccttaaattcgttaaaggcggtgcgactaaggttccgttccgctgtgcctggaagctgaatgcgccaaggtaagttaagtagggcgacgcttctctggccgcctgctggagattttcgctgacttgatttcctcggggctccaaataagcatttgattcgatgtctcgtttaggagctggagggatgtataaacggaaaccaatctgaagcacggtatttaactggatgcggttaacccttgcgagctcggctgctgttgtattgaactgccgggcgatggatgtcagggtatcacctcgcttcacatcatagaactggccagctattggaatgacaatggtttgtccgacaacaaggctgtcgggattcggtatttcattcgtttcagtgatgtcatttgtggttgttctgtattgtgaagcgatagcagaaagagtgtcgccttgttttaccacataaatttgaatgaaaaacgcctcctttcatatcgctatcaatgtatgaaagaaaagcgctgatcatgtttatttttctataatttgttcttccgtcgtaatttctgcgaaaagaacattctccatcatggttaaggcgaattcgttatcttcgtcactgtttgacgcgatacagtccttaggaatcgtgatgctgtattccctcatataagcgtcattagcggtaaacagcacgcatatattgccggctatacctgttatgataatatgtctcacctgcaactcagtaagaagggtgtgaagtgctgtttcgtagaaagcggaatgtttcggtttgattaaaaaataatcagcatctaccggagctatctttgtgatgatatccttgcttctttcatttgtgcattcttgctgtatgtttttaatgtcagcttgccaaagtccataatgatcattgatgtaaataatcggccattcattttgtctcgcgtgctcctttaatgataaaatatgaggaacgattttttctgtttttttagcgagggtttcccccatatcgaattcaaaattattgatcatgtctacaatgagaagggctttatctgctttggacaatcgacagtctcctttccgtttcagttatagttaatatgtagcctttttaggcaatgaaaaaactttgaaaagagagcttatccttatgacacaagatgaactttatatgaaagaagcaattaaagaagcgaaaaaggctgaagagaaaggtgaagtgccaataggtgcggtgcttgtcattaatggtgaaattatagcgcgtgcgcataatttaagagagactgaacagcgatctattgcccatgcagaaatgcttgtaattgatgaagcgtgtaaggcactcggaacatggcggctggaaggtgcgactctttatgtgacgcttgagccttgtccaatgtgtgctggtgcagtcgtactttctcgagtggaaaaagtggtttttggcgcatttgatccgaaaggcggctgttcaggcacgctaatgaaccttcttcaggaggaacgctttaatcatcaggctgaagtggtgagcggtgtgcttgaggaagaatgcggcggaatgctcagtgcgtttttcagagaactaagaaaaaagaagaaagccgccaggaaaaacttgtctgaatagtacggttgcaatttttaggggaaacagatatacttaagtgtgcatcgtaatagatgcaacataaaatttgatatttattttgccgtgctaagcggggaggtagcggtgccctgtacctgcaatccgctctagcagggccgaatcccttctcgaggttcgtttactttaaggcctgccttaagtaagtggtgttgacgtttgggtcctgcgcaatgggaattcatgaaccatgtcaggtccggaaggaagcagcattaagtgaaacctctcatgtgccgcagggttgcctgggccgagctaactgcttaagtaacgcttagggtagcgaatcgacagaaggtgcacggtaaatcaatcatcaaattttcagactcacctaatattaggtgagttttttgttatgtaaaaagagcttttggaatcgaaacaaggttcatgtataatgggaatgatgaataacggaggagggcaaacccgtgagttaccaagctttatatcgagtattcaggcctcagcgctttgaagatgtggtcggacaagaacacattacaaaaacgctgcaaaatgcccttttgcaaaaaaagttttctcacgcctatctgttttccgggcctagaggaaccggaaaaaccagtgcagccaaaatatttgctaaggctgtcaactgtgaacatgctcctgttgatgagccatgcaacgaatgtgcggcctgtaaagggataacaaacgggtcaatatccgatgtcatagaaattgacgccgcttctaataacggtgttgatgagattcgtgacattcgcgataaagtgaagtttgccccatcggccgtcacatataaggtatatatcatagatgaggtgcatatgctttctatcggcgcttttaatgcattactaaaaacattagaagagccgcctgagcattgtattttcatattagcaacaactgaaccgcacaaaattcctttaaccattatctctagatgtcagcgttttgactttaaacgaattacctcccaagcgattgtaggccgcatgaataaaattgttgatgctgaacagctgcaagtggaggaaggatcgctggaaatcatcgcgagtgctgcagacggagggatgagggatgccctgagccttcttgatcaggccatatcattcagcggcgatatcctgaaagtcgaagatgcgcttttaattacgggtgctgtttctcaattatatatcgggaagcttgcaaaatccctgcatgataaaaacgtttctgacgcactggaaacattaaatgaattgcttcagcaaggaaaagatccagctaagctgatagaagatatgattttctatttcagggacatgctgctgtacaaaacagcccctggcttagagggagtgcttgagaaagtaaaagtcgatgaaacgttccgggaactaagtgaacaaattccggctcaggccctatatgaaatgattgatattctgaacaagagccatcaggaaatgaaatggacaaatcatccgcgtatctttttcgaagtggccgttgtgaagatttgccaaacctcacatcaatctgctgctgatctcccggaagtggatatgctgatgaaaaaaatccagcagctcgaacaggaagtagagcggctcaaaacaacgggcataaaagcagctgcggaaagcccgaaaaaagaagcgccgcgtgtgccaaagggcgggaaatccaattacaaagcgccagtaggcagaattcatgagattttgaaggaagccacaagaccggatcttgatctgctcagaaacagttggggcaagcttcttgctcatctcaaacagcaaaacaaagtatcacatgccgctttgctgaatgacagtgaacctgtggctgccggatcggcggcatttgttctgaaattcaaatatgaaattcattgtaaaatggtcgctgaggataacaacggagtccggactaatcttgagcagattttagaatcgatgctcggaaaaagaatggatttgattggcgttccagaagcacaatggggtaaaataagagaagaatttttagaagatcatcagcaggaaaatgaaggatcaaatgaaccggctgaagaagacccgcttattgccgaagcgaaaaagcttgttggagcggatttaattgaaataaaagactaacaaaatgaaagagagtgaatgctatgcgtggcggaatgggtaatatgcaaaaaatgatgaaacaaatgcaaaaaatgcaaaaggacatggcgaaggctcaagaagagcttgcagaaaaggttgttgaaggaactgcaggcggcggtatggtaacagtaaaagcaaacggccaaaaagaaatcctggatgttatcatcaaagaagaagtcgttgatcctgaagatattgatatgcttcaagatttagtgcttgctgcaacgaatgaagctttgaaaaaagttgacgaaatcacaaacgaaacaatgggtcaatttacaaagggaatgaacatgccaggtttattctagggggataaaagaacatgcaatatcctgaaccaatatcaaagctgattgacagctttatgaaattgccagggatcggaccgaaaacagcggttcgtctggctttttttgttctaggtatgaaagaagatgtagtattagattttgcgaaagcattagtaaatgcgaaacgcaacctgacatattgttcagtttgcgggcatattacagatcaggacccttgctatatatgtgaagatacgcgcagggataagtctgttatctgtgttgtgcaagaccctaaagacgttatcgctatggagaaaatgaaggaatacaacggacagtatcacgttcttcacggcgctatttctccaatggacggcatcggaccggaggatattaaaataccagaattgttaaaacgattacaggatgatcaagtgacagaagtgatcctcgcgacaaaccctaatatagaaggggaagcaacagcgatgtatatatcaaggctcctcaagccgtctggtattaagctctcccgtattgcccacggactgcccgtcggcggtgatttggaatatgctgatgaggtcactctttctaaagcacttgaaggaagacgtgaattgtaaggaggaaaaagcgatccatgggttttcttcgcaagaaaacattaagaagagagtttgatgaaaaactaaccgagcagctttttaagcaaaaggaagagtggaacaggcaaaaaaagctggttgaaaaaagcttagaaccgtctgctgaagtgttatacgaactgaaagtagctgaagcgaagtattttttttacttaagggaagcgaagcagcgaaatttaaaaatcagccggtggaagtaagtggtctaaactcctggatcttctcataagcttgtactagaacaagcgaaggagatgagaagattcatggagcctatttttattattgggattattttaggactggttattcttctttttttatcaggttcagcagcgaagcctttaaagtggattggcatcacagctgttaaatttgtggcaggtgctttgctgctggtttgtgtaaatatgtttggcggcagtcttggcattcatgtgccgattaatctggttacaacagctatcagcggaattttaggaatacccggaatagctgcgttagtcgtcattaagcaatttatcatttaattgatattatgtattgacttagacaactgaaggtgttattctaatatacgtcgctgatgacgaacagcttttttgaaaagaaaatgctaaaaagttgttgacagtagcggcggtaaatgttatgataataaagtcgcttaaacgagcggtaaacaaagttctttgaaaactaaacaagacaaaacgtacctgttaattcatttttataaatcgcacagcaatgtgcgtagtcagtcaaactactttatcggagagtttgatcctggctcaggacgaacgctggcggcgtgcctaatacatgcaagtcgagcggacagatgggagcttgctccctgatgttagcggcggacgggtgagtaacacgtgggtaacctgcctgtaagactgggataactccgggaaaccggggctaataccggatggttgtttgaaccgcatggttcaaacataaaaggtggcttcggctaccacttacagatggacccgcggcgcattagctagttggtgaggtaacggctcaccaaggcgacgatgcgtagccgacctgagagggtgatcggccacactgggactgagacacggcccagactcctacgggaggcagcagtagggaatcttccgcaatggacgaaagtctgacggagcaacgccgcgtgagtgatgaaggttttcggatcgtaaagctctgttgttagggaagaacaagtaccgttcgaatagggcggtaccttgacggtacctaaccagaaagccacggctaactacgtgccagcagccgcggtaatacgtaggtggcaagcgttgtccggaattattgggcgtaaagggctcgcaggcggtttcttaagtctgatgtgaaagcccccggctcaaccggggagggtcattggaaactggggaacttgagtgcagaagaggagagtggaattccacgtgtagcggtgaaatgcgtagagatgtggaggaacaccagtggcgaaggcgactctctggtctgtaactgacgctgaggagcgaaagcgtggggagcgaacaggattagataccctggtagtccacgccgtaaacgatgagtgctaagtgttagggggtttccgccccttagtgctgcagctaacgcattaagcactccgcctggggagtacggtcgcaagactgaaactcaaaggaattgacgggggcccgcacaagcggtggagcatgtggtttaattcgaagcaacgcgaagaaccttaccaggtcttgacatcctctgacaatcctagagataggacgtccccttcggggcagagtgacaggtggtgcatggttgtcgtcagctcgtgtcgtgagatgttgggttaagtcccgcaacgagcgcaacccttgatcttagttgccagcattcagttgggcactctaaggtgactgccggtgacaaaccggaggaaggtggggatgacgtcaaatcatcatgccccttatgacctgggctacacacgtgctacaatggacagaacaaagggcagcgaaaccgcgaggttaagccaatcccacaaatctgttctcagttcggatcgcagtctgcaactcgactgcgtgaagctggaatcgctagtaatcgcggatcagcatgccgcggtgaatacgttcccgggccttgtacacaccgcccgtcacaccacgagagtttgtaacacccgaagtcggtgaggtaaccttttaggagccagccgccgaaggtgggacagatgattggggtgaagtcgtaacaaggtagccgtatcggaaggtgcggctggatcacctcctttctaaggatattttacggaatataagaccttgggtcttataaacagaacgttccctgtcttgtttagttttgaaggaactttgttccttgaataagttaagatgggcctgtagctcagctggttagagcgcacgcctgataagcgtgaggtcggtggttcgagtccactcaggcccaccatcttatataacggggccttagctcagctgggagagcgcctgctttgcacgcaggaggtcagcggttcgatcccgctaggctccaccaacgtgttctttgaaaactagataacagtagacatcacattcaattagtaacacaagatatcacatagtgattctttttaacggttaagttagaaagggcgcacggtggatgccttggcactaggagccgatgaaggacgggacgaacaccgatatgcttcggggagctgtaagcaagctttgatccggagatttccgaatggggaaacccaccactcgtaatggagtggtatccatatctgaattcataggatatgagaaggcagacccggggaactgaaacatctaagtacccggaggaagagaaagcaaatgcgattccctgagtagcggcgagcgaaacgggattagcccaaaccaagaggcttgcctcttggggttgtaggacactctgtacggagttacaaaggaacgaggtagatgaagaggtctggaaaggcccgccataggaggtaacagccctgtagtcaaaacttcgttctctcctgagtggatcctgagtacggcggaacacgtgaaattccgtcggaatccgggaggaccatctcccaaggctaaatactccctagtgaccgatagtgaaccagtaccgtgagggaaaggtgaaaagcaccccggaaggggagtgaaagagatcctgaaaccgtgtgcctacaagtagtcagagcccgttaacgggtgatggcgtgccttttgtagaatgaaccggcgagttacgatcccgtgcaaggttaagcagaagatgcggagccgcagcgaaagcgagtctgaatagggcgcatgagtacgtggtcgtagacccgaaaccaggtgatctacccatgtccagggtgaagttcaggtaacactgaatggaggcccgaacccacgcacgttgaaaagtgcggggatgaggtgtgggtaggggtgaaatgccaatcgaacctggagatagctggttctctccgaaatagctttagggctagcctcaaggtaagagtcttggaggtagagcactgattggactaggggcccctaccgggttaccgaattcagtcaaactccgaatgccaatgacttatccttgggagtcagactgcgagtgataagatccgtagtcgaaagggaaacagcccagaccgccagctaaggtcccaaagtatacgttaagtggaaaaggatgtggagttgcttagacaaccaggatgttggcttagaagcagccaccatttaaagagtgcgtaatagctcactggtcgagtgactctgcgccgaaaatgtaccggggctaaacgtatcaccgaagctgcggactgttcttcgaacagtggtaggagagcgttctaagggctgtgaagccagaccggaaggactggtggagcgcttagaagtgagaatgccggtatgagtagcgaaagaggggtgagaatcccctccaccgaatgcctaaggtttcctgaggaaggctcgtccgctcagggttagtcgggacctaagccgaggccgaaaggcgtaggcgatggacaacaggttgatattcctgtaccacctcctcaccatttgagcaatggggggacgcaggaggatagggtaagcgcggtattggatatccgcgtccaagcagttaggctgggaaataggcaaatccgtttcccataaggctgagctgtgatggcgagcgaaatatagtagcgaagttcctgattccacactgccaagaaaagcctctagcgaggtgagaggtgcccgtaccgcaaaccgacacaggtaggcgaggagagaatcctaaggtgatcgagagaactctcgttaaggaactcggcaaaatgaccccgtaacttcgggagaaggggtgctctgttagggtgcaagcccgagagagccgcagtgaataggcccaggcgactgtttagcaaaaacacaggtctctgcgaagccgtaaggcgaagtataggggctgacgcctgcccggtgctggaaggttaagaggagcgcttagcgtaagcgaaggtgcgaattgaagccccagtaaacggcggccgtaactataacggtcctaaggtagcgaaattccttgtcgggtaagttccgacccgcacgaaaggcgcaacgatctgggcactgtctcaacgagagactcggtgaaattatagtacctgtgaagatgcaggttacccgcgacaggacggaaagaccccgtggagctttactgcagcctgatattgaatgttggtacagcttgtacaggataggtaggagccttggaaaccggagcgccagcttcggtggaggcatcggtgggatactaccctggctgtattgaccttctaacccgccgcccttatcgggcggggagacagtgtcaggtgggcagtttgactggggcggtcgcctcctaaaaggtaacggaggcgcccaaaggttccctcagaatggttggaaatcattcgcagagtgtaaaggcacaagggagcttgactgcgagacctacaagtcgagcagggacgaaagtcgggcttagtgatccggtggttccgcatggaagggccatcgctcaacggataaaagctaccccggggataacaggcttatctcccccaagagtccacatcgacggggaggtttggcacctcgatgtcggctcatcgcatcctggggctgtagtcggtcccaagggttgggctgttcgcccattaaagcggtacgcgagctgggttcagaacgtcgtgagacagttcggtccctatccgtcgcgggcgcaggaaatttgagaggagctgtccttagtacgagaggaccgggatggacgcaccgctggtgtaccagttgttctgccaagggcatcgctgggtagctatgtgcggacgggataagtgctgaaagcatctaagcatgaagcccccctcaagatgagatttcccattccgcaaggaagtaagatccctgaaagatgatcaggttgataggtctgaggtggaagtgtggcgacacatggagctgacagatactaatcgatcgaggacttaaccacattttgaatgatgtcacacctgttatctagttttgagagaacacctctctaaaggcggaaggtaaggaaactccgctaagggctctcacatcctgtgagaaacgcccagtaccttcatcctgaaggcatttgtttggtggcgatagcgaagaggtcacacccgttcccataccgaacacggaagttaagctcttcagcgccgatggtagtcgggggtttccccctgtgagagtaggacgccgccaagcaagcttaaacccagcttaatgagctgggttttttgtttactcaagatcgagaaaatcaaacaaatacaaacaccgagggcttatatagcccatatactgatttaaagtttcaaaaaggtctaaatagtgtatacaatatccgttttaaggggaggctaactgtacggaggtggagaagatggacgaaacagttaaacttaatcatacatgtgtgatttgtgatcaagagaagaatagaggcattcatctttatacgaaattcatatgcttagattgtgagagaaaagtaatttctacatcaacttctgatcctgactatgcgttttacgtaaaaaaactaaagagcattcatacaccgccattatattcatagacctgaaaaggtctttttttgtactcttaataataaaaagaagatgaaacttgtttaaggattgaacgtagtagataataatattaaaactgagtatagacacaggagtcgattatctcatgcagagattttttcactttttggtgtggagtttaactagcagtgcgacttttgttttcattggaatattgagcttttttggtttaaaccagtcgatttttttatctattgtttatgggcttgcttctggagcagccgtatatatagctggcatctggaatgcaagacggttatttcttaaaaagcatgaattgacaggaagagagtatgcttacattaagaaaaacttagaggaagcaaggcagaaaatggtccgtcttaggaaagccttgtttcaggctaaaagcattcaaatgtttaagcaaaatgcagaaatgctaaggattgtgagaaggatttatctcctcaccaaaaaagagccaaagcggttttatcaggcagaacgatttttttatcaaactctcgattcggttgttgaattgacagagaagtatgcttttctatcatctcacccaaaaaaaagcaaagaactgtcgatgtcgttaagtgagacacgcatcactcttactgaattgaccaagcgtttagaggaagatttaactcaagcaatgggtgatgaaattgacgagttgcagtttgaattagacgcagcaaaacattcattaaagaaataagggaagagggtaagagcgatgaaccgagaccaaagcgaccttcatatagatgaattattggcagatccttttggtggtaacatagagataccaggttcggaggctgtaaaagcagagaaagagcaagtacggcttgttgatgttcttcctgaggaaaacaaggaaaaagcaattcagcttgctggacagattgatcataaaaatatgcaaagcattgtcttatacggttcacaagctcaatctaaactgctgaacttttctcatgatatgattaatcatgttcaaaagaaggatgtcggggagattggcgaaatacttggagagctgatgaaaaagctggagcaagtaaatcctgatgatctccaatctaagaaaaagggttttttggcacgcatgtttggaagagtatcaagttctcttcaagaggtgctgtctaaataccaaaagaccagtgtgcagatagacagaatcagcttgaagctggagcactctaaaaatgctttaatcagtgacaacaagctgttagagcagttatatgaaaaaaataaagaatatttcgcagcgctgaatgtttatattgctgcaggagaactgaagctggaggaattaaaaacaaaaacgattcctgaactgaagcaacaggctgaatcgagtgatcataaccaaatggccgttcaagaggtgaatgatttaattcaatttgctgaccggttagataaaagggtgcatgatttgctgctgagcaggcaaattacaatccaaagtgcaccgcaaatcaggctgattcaaaatacaaaccaagcgttagctgaaaagattcagtcatccattgtgacagcgattccgttatggaaaaatcaagttgccattgcactgacgcttttaaggcagcgcaatgcagtggatgcacagcagaaagtatctgatacaaccaatgagcttttgctgaaaaatgcggagcttttaaaaaccaatacaattgaaactgcacgggcaaatgaaagaggccttgttgatatagataccttgaagaaggtgcaggaaagcttaataagcacgcttgaagaaacactgactatacaagaagaaggacgaatcaaacgccgtcaggcagaagaagagctcatgatgatggaaggcgacctgaagcaaaagctgattacaataaaggaaagatgattaccagtaagtctggctttaagttctgtcagaggcacgatataataaggtgtaagaagacacattcaaaggattgttttcatgaacacacctttatataaagcattaattcaacatgcgagaagaaattctcattcatttcatgttccgggacatcacaatggagatgtcttttttgatgacgctaagtcaatattcgatccgcttctcaccattgatgtaactgaactggcaggactggatgatctccatcatccttctggggtgattaaggaagctcaggagcttgccagtcaattatatggatcggcggaaagtttttttctggtaaatggtacgactgtcggaaacttagcgatgattttatctgtttgtgaacctggtgatacaattctggttcaaagaaactgtcataaatctgtatttcatgctgttgatttgtccggtgctgagccggtttatcttgcacctgacgttgattcagcgatgcatgtgcctacgcatgttccgcttggaacaattaaagaggccctggaagcatatccagatgcgaaaggcttggtactgaccaatccgacatattacggacatagtgctgatttgactgagatcattactgaagcccatcattacgggattcctgttttggtcgatgaagcgcatggcgcacattttattttaggtgagccttttccggtctcagctttaaaaatgggggcagatattgttgttcagtcggcccacaaaacgttgccagccatgacgatgggttcttatttgcatctcaacagcagctgcaggattaacagggatcgggtggcagagtatttaaaccgattacaaagcagcagcccgtcttatccgattatggcttcgttagatattgcccgcgcttatgtacagcatattatagaagaacaaaagctttctgacattctgcagcggatagaaacacttaaacaaacgtttgattcacttacaaatgcagaagctgttaaccctgctaatccactgatcatcacggatccgctaaagctcacaattcgttcaaaacgcgggcattctggctatacgctgcaaagcattttagagcgtgccaacatattcactgagcttgctgatgaaaatcaagttctgctcgttctcccattgggaggaaaacggagaataaacgctgaaatcattagaagcatcgatgaagagattgagaaaacgcctccggatcagacgtttgtttctgcagaatggggtgtgcagcctgttactgtcttgccttatccaaaaaaggtcttacattcgtttaagaaagaatatgtgagctttgaggaagcagctggccggcttaatgcagaagatatcatcccttatcctccgggtatcccgatgattatggcgggagaaagaataacaaaagaaagtgtgcaaaagctcagccgcttgatcagcatgaaaacgcatgttcaagggaatatgaaaatcaaagagaaacaactacttgtttatatagaagaggagaaatcatgagcggtttatttattacattcgaaggtcctgaaggtgcagggaaaacgactgttctgcaggagatcaaaaacatactgacagcagaaggccttcaggttatggcaactcgagagccaggcggaatagatattgcagaacaaattagagaggttattctgaatgagaacaatatattaatggacccaaaaacagaagctctcttatatgcggctgcaagacgccagcatttagttgaaaaagtaaaacctgctttagaacaggggtttatcgttctttgcgacagattcatagacagttctcttgcgtatcaaggatatgcaagagggcttggaattgatgaggttctgtccattaatgaatttgccattggagatatgatgccccatgtaacggtttatttttcaattgatccggaagaaggactgaagcgtatttacgcaaacggctcacgggagaaaaacaggctcgatttagaaaaactggactttcatacaaaagtacaagaaggttatcaagagctgatgaagcgatttccggaaagatttcattcagttgatgccgggcaatccaaagacctcgtcgttcaggatgttctaaaggtgatcgatgaagcgttgaaaaaaattcaattgtgacctgtttcccaatagttgatataataatgtaaacgagatcacgttgtttccaatctaaaggaggccttcacagatgaaattgatagtggcagttgtacaagatcaggacagcaacagacttttgaaaaccttaacggatcacaacttcagagtcacaaagcttgcaacgacaggaggatttcttaaatcaggcaatacaacgtttatgatcggtgtcgaggatatacgcgtcaataaagcgttgagtctcattaaagaaaacgggcagaaacgtgatcagatgattgcccctgtatctccaatgggtggaaatgctgattcctatgtcccttatccagtcgaagttgaagttggcggagcgacagtatttgtccttccagtcgatgaatttcatcaattttaaggatctgaaactgtgaaaattaataaagatatacgtacatttatagataataagcagattccctctgtgaaaacatctgagatcacagcatcgtttaaaacatcaatggaaaaccaaagcagcaaaatgaagcttgatcagcttaccaggctgttatctgatatagaagcatttggaaaaaggctaacgaaatctcggaattttaaagacttagcgagatttaaaggacttgtgaaacgttttgtcaaagaagctgtggacagcggtctttcacatgaaacatcgaaaagctttgacctttacgggaacagcagaacgctgggacttgtgaaagaaatagatgacaaattgatacagcttacggaagagatgatggatcaggaaaaaccggcaattgatttgctggagcgtattggcgaaataaaaggtttattaattaacctttacacatagagagtgatacaatggcaatatcctggaaggaaatgaacgagcttcagcccagagtgatgaagcttttatataatagtattgagaaggacagactatcacacgcttatttgtttgaggggaaaaaaggaacaggcaagcttgatgccgcgctgcttcttgcaaaaagcttcttttgtctggagggtggcgcggagccttgtgagagctgccgaaactgtaaacggatagagtcagggaaccatcctgatctccatcttgttcagcctgatggcttatcaatcaaaaaggcgcaaattcaagcgctccaagaagagttttctaagacaggacttgaatcgcataaaaagctgtatattatttcgcacgcagatcaaatgacagcaaatgcggcgaacagcctgctgaaatttttagaagaaccgaacaaagacacaatggccgtcctcatcactgagcagccccaaaggttattggataccatcatttcaagatgccaaacccttccttttcagcctttgcagccgaaagcaattgaagacagactgatcgaacaggacgtctcgcctcatatggcaaggcttctggccaacatgactaataatgtagcagaagcagtcgaattaagtcgaaatgatgagtttgcagagtctagagcgaaagtgataaaattgtatgaagtcctacaccagcggaaaggacatgcttttttctttattcaagatcaatggatgccctttttcaaagaaaaaacccatcaagaaatgggtcttgatatgctcttattgatatatcgtgatgtgttgtccatccaaataggaaatgaagataaattgatttatcaagacttattccaatcaataaaacagcatgcgctacaatcaacacaacaaagcgttacgaatcagatacttgctgttttagaagcaaagaaacggcttcattccaatgtgaatgtacaaggattaatggagcacttggtgttaatgttgcaggagggataagcttgtacaatgtaattggtgtccgctttaagaaagcgggtaaaatatattattttgatccgaatggatttcatatagaacatgacagctgcgtaattgtagaaactgtcagaggcgttgagtacggccaggtcgtaattgcaaataaacaggtggatgagcatgatgtggtgcttccccttcgaaaagtgatacgtgtggcagacgatcgcgatcttctcattgtagaagaaaataaacaggaagcactatcagcatttgatatctgccaaaagaaagtgattgagcatggcttggatatgaagctggtcgatgttgaattcacgtttgatcgcaataaagtcattttttacttcactgctgacggccgagtcgactttagagagcttgtaaaggatttggcttctatctttaagacaagaattgagctgcgccaaatcggagtgagggatgaggcaaaaatgctcggaggaatcggtccttgcggaagaatgctttgctgttcaacgtttcttggagattttgaacccgtttccattaaaatggccaaggatcagaacttgtctttaaatcctacgaagatttcgggtctttgcggacgattgatgtgctgtctaaaatatgagaacgatgagtatgagacggcaaaagaacagcttccggatataggagaaatgattacgacagcaaacggtcccgcgaaggtcgtcggactaaatattctggaacgggtgcttcaggtggaactgataaaccgtgaaaaagtgatagaatatacttgggaagagctcttggaagagggcgtcgtatccgcacaaaccacagattaacgaggtgtggaaccttggataaaaaagagttatttgatacagtcattaacttagaagaacaaattggctcactgtaccggcagctgggggatttgaagcagcatatcggtgagatgattgaggaaaatcatcatttacagcttgaaaacaagcatttgcgcaaacggctggacgatacgacgcagcagattgaaaagttcaaagctgataaaaaagaatcaaaaacacagaagacagagcaaactgatataggggaaggatatgataatctggcacgtctgtatcaagaaggatttcatatctgcaatgtccactatggaagtgttcgaaaagaggattgtcttttctgtctgtcattcttaaataaaaaatagggaaaaggcttccgcataagacgggagcctttttcaaaggtactgaaaggataagaagatggtttcattacatgatgatgaaagattagattatttgctggcagaggacatgaaaatcatacaaagcccaacagtgtttgctttttcgttggacgctgtgcttctgtccaaatttgcgtacgttccgattcaaaaagggaaaattgttgatttatgcaccggcaatggtattgtgccgctgctgctcagtacaagatcaaaagcagacattctgggagtcgaaattcaagaaagactgcatgatatggctgttcgcagcgtggagtataataagttggacgatcagatccagatcatacatgatgacctgaaaaacatgccggagaaacttggacataatcgatatgatgttgtcacctgcaatccgccgtattttaaaacgccgaaacaaactgaacaaaacatgaacgagcatctccgaatcgcaagacatgaaatccactgcacgctggaggatgtcatttcagtcagcagcaagctgctcaagcaagggggaaaagcagctcttgttcaccggccgggaaggcttctggagatttttgaactgatgaaggcttatcaaatcgagccgaaacgtgtacaatttgtctatccgaagcaagggaaagaagccaataccattttggttgaaggtatcaaaggcgggcgcccggatttgaaaattcttcctcccttattcgtatatgatgaacaaaatgaatatacaaaagaaatcaggaccattttatatggagacaaataaccatttcttctacgtcgtgaaatgtaaggacaatagctggtatgccgggtataccaacgatctgcataaacgagtgaaaacgcacaatgatggaaagggcgcaaagtacacaaaagtaagacgtccggttgaattaatttttgccgagagcttttcaacaaagcgggaagctatgcaggcggaatattatttcaaaaaactaactcggaagaaaaaagagctttatatagaagaaaagcggaacagcaaggaggctgtatatgttaaggcgccaaatgagctttaatggaaagtcggacatggggattctttacttggtcccaaccccaatcggaaatttagaggatatgacattccgggcgatcgacacgctgaaatcagtggatgcgattgctgcggaagatacgaggcaaacgaaaaagctttgtcatgtatatgaaattgaaacaccgctcgtcagctatcacgaacacaataaagaaagcagtgggcacaaaattattgaatggctgaaatcgggaaaaaacattgctcttgtcagtgatgccggtctgccgacgatttctgatcccggagcggaaattgtaaaggattttacggatataggcggttatgttgttccgttgccgggagcaaatgctgcattaacagctcttattgcttcaggtattgtaccgcagccttttttcttttacggttttctcaacagacagaaaaaagaaaagaagaaggagcttgaagcccttaaaaaacggcaggaaacgatcattttttatgaagcgccccacagattgaaggaaaccttgtcagcgatggcagagatattaggagatcgggaaattgctgtaacacgtgaactcactaagaaatatgaagagtttatccgaggaaccatatctgaggtcattggatgggcaaacgaggatcagatacgcggcgagttttgtcttgtcgtagaaggaagtaataatgaagaggtagatgaggaagaacaatggtgggaaaccctcactgcgaaagaacatgtcgagcattacatttcgaaaggcgctacgtctaaagaagctattaaaaaagcagcagtcgatcgcaatgtaccaaagcgtgaagtgtacgatgcttaccatattaagcaataaaaaaacgttcttgtgtcataacaagaacgttttttgtacaagaaatgattatttaaggttttgaagctggttttggatttcgctgatgatttgctcagcgccttctttactaagaaccaatttaccgcctgcaagtttaaggttatcatcagaaacttcaccagttacttggcaagtcatgtttggtttatattttttaaggatgattttttcatcatcaacatagatttcaagagcatctttttctgcgattccaagagtacgacgcagttcgataggaataactacacgtcctaattcatcaactttacgtacaataccagtagatttcataaacattctcctcccaagagatacttatttgtttaaattatatttttcttcgtcattattcgacaaaatccttaccttcatagcataacaaggtttccaataatcgtcaatcattttgtttactattgattgtaagaattagttcttatagtcagtaatgtcttggaaactaccgaaataacagcattttataaatatttaataaagctattatcctactaaaaatccttttaaatcaagactttcgaaccaaagttttttatttcatttgattatatacgacaaaattcgacacgaacagactttttttattttcattaaagatttttaattttaattattctttttcagggcgtatgtatatattcttgatcttaaaggctaagatggtatcatagataaaggataaatataaataatattcatatatgatttgcacttatcgccgctctcgtcctttgggcgggagctttttgacattctgattaggaggtttcaagatgccgcaagaaaacaatacattttacattacaacaccgatttattatccgagcggaaaattacatatcggccatgcatatacgacagtcgcaggagatgcaatggcacgttacaaaagattaaaagggttcgatgttcgctatttaacgggaacggacgagcatggacaaaagatccagcaaaaagctgaacaggaaaacattacacctcaggagtatgtggatcgcgcagcggcagatattcaaaaactgtggaagcagcttgaaatctcaaacgacgactttatccgcacgacagaaaaacggcataaagttgtcattgaaaaagtgtttcaaaagcttcttgataacggggacatctatcttgatgagtatgaaggctggtacagcatccctgatgaaacgttctacacggaaactcagctcgttgatattgagcggaatgaaaagggagaggtcatcggcggaaaaagccctgacagcggtcacccagttgaattgatcaaagaggaatcttatttcttccgcatggggaaatacgcggatcgtcttctgaaatactatgaagaaaacccgacattcattcagccagaatcacgcaaaaacgaaatgattaataactttatcaaacctggacttgaggatttggcagtatcacgtaccacttttgattggggcgtgaaggtgccggaaaatccaaagcatgttgtatatgtttggattgacgcactatttaactatttaacggcactcggttatgatacagaaaatgatgagctttatcaaaaatattggcctgccgatgttcatttagtcggtaaggagattgtacgattccatactatttactggccaattatgctgatggcgctggatcttccgctgccaaagcaagtattcgcgcatggctggcttttgatgaaagacggaaaaatgtcgaaatcaaaaggaaacgttgtagatccggttacattaattgaacgctatggtttagacgaacttcgctattacttgcttcgcgaagtgccgttcggatcagacggtgttttcacgccggaaggatttgttgagcgaatcaactatgatttagcgaatgatttaggaaatctattgaatcgtactgttgcgatgattaataagtattttgacggacaaatcggttcttacaaaggtgctgttacggaatttgaccatacgctcacttctgttgctgaagaaacagtgaaagcttatgagaaagcaatggaaaatatggagttctcggtagcactttcgactttatggcagctcatcagccgcacaaacaaatacattgatgagacagctccatgggtgcttgcgaaagatccggcaaaagaagaagaattgcgatcagttatgtatcatctcgctgaatcattgcgtatttcagcggtactgcttcagccattcttaacaaaaacacctgaaaaaatgttcgagcagctgggcattactgatgaatctttaaaagcttgggacagcattacagctttcggccagctgaaagatacaaaagtacaaaaaggcgagccattgttccctcgtttagaggcagaagaagaaattgcttacatcaaagggaaaatgcaaggttcagcaccagcgaaagaagaaacaaaagaagaagagcctcaagaggtcgatcgtttacctgaaattacgattgatcaatttatggatgtagagcttcgcgtagctgaggtcattgaggcagagccagtgaaaaaagcagaccgtttattgaagctgcagcttgatcttggttttgaaaagcgccaagtggtatccggcattgcgaagcattatacgcctgaagagcttgttggaaaaaaactcgtttgtgtaacaaatctaaaaccggttaaactcagaggagagctttctcaaggtatgatccttgcaggagaagcagacggcgttttaaaggtcgtatctatcgatcagtcgttaccaaaaggcacaagaattaaataatgataaacaaaaggtgtttcacgtgtaacaattcgtcgaacaccttttgtgtttcgacaagaaaggagtttttcacttatgttgtttgacactcacgcgcatttaaatgcagaacaatatgatactgatcttgaagaggttattgaacgggcaaaagctgaaaaagttgaacgaattgtcgtagttggttttgaccgtccgacgattacccgtgcgatggaaatgattgaggaatatgattttatttatgcagccattggctggcaccctgttgacgctattgacatgacagaggaagacttagcgtggattaaagagctttctgctcatgagaaagtggtagcgataggggaaatgggactggattatcattgggataaatcacctaaagatattcaaaaagaggtgtttagaaatcaaatcgccttagcgaaagaggtcaatttgcctattatcattcataaccgtgatgcaacggaggatgtcgtgaccattttgaaagaggaaggcgcagaagctgtgggcggaatcatgcactgctttacaggaagtgcggaagtggcaagagaatgcatgaaaatgaatttttatttatcatttgggggaccggtgacatttaaaaatgcgaagaaaccgaaggaagtagtgaaggaaattcccaatgaccggctgctgattgaaacggactgcccgtttctcacaccgcaccctttccgcgggaaaagaaatgagccaagctatgtgaaatatgtggcagaacaaatcgccgaattaaaagaaatgacctttgaagagattgcttccatcacgactgaaaatgcgaaaagacttttccgtataaactgacaaaaaacgctagcgggttttgtaagagcttgtcccttacagcgtttttctataaaagttctacatgctttcttctcctcataggataggtttgtcgacaagtctttcttccgtttctcagtgtatttcaggataatgaagaggacactgagcttttgggagaaagagaagggagggttgacagccttttagatactctatataatctctccgaggagaaggaggcgtttttcatcacacaaaaaatgaaaaagctgttttccgtaaagcttagcaaaagcaaagtcattctggttgctgcttgtttgcttttggcaggaagcgggactgcgtacgcggctcatgagctgacgaaacaatcagtctcagtttctatcaatggcaaaaagaaacatatacgcacacatgcaaatacagtcggtgatcttttggagacgcttgatataaagacaagagacgaagacaagatcacacctgctaaacagacaaagataacagcagacatggacgttgtgtatgaggctgcaaaacctgtgaagcttacaataaacggggaagaaaagacgttatggtcaacagcaaaaacggtcggtgcattactggacgaacaagatgttgatgtgaaagaacaagatcaaattgatcccgcaatagatacagatatttcgaaagacatgaagattaacatagagcccgcatttcaggttactgtgaatgatgcagggaaacaaaagaagatctggacgacttcgactacggtcgctgactttttaaaacagcaaaagatgaacataaaagacgaagataaaatcaagcctgcgttagatgcaaagctgacgaaaggaaaggctgatattacaattactcgtatcgaaaaggtcaccgatgtagttgaagagaagattgcgttcgatgtgaaaaagcaagaagacgcttctcttgaaaaagggaaagaaaaggtcgtccaaaaaggaaaagaaggcaagctaaaaaaacatttcgaagtcgttaaagaaaacggtaaagaagtgtccagagagcttgtaaaagaagaaacagctgaacaaagcaaagataaagtgattgctgtcggcacaaagcaaagcagtccaaaatttgaaacggtcagtgcttcaggtgattcaaaaacagttgtgtcccgcagcaatgaatcaacaggcaaagtcatgactgtatcatctacggcttatacggcaagctgcagcggttgttcaggacatacagcgacaggcgtcaatttaaaaaataatccgaatgccaaagtcatcgctgtggatccaaatgtcattccgctaggctccaaagtccacgtggaaggctatggatatgccattgctgcagataccggttcagcgattaaagggaacaagatagacgtctttttcccagagaaatcatcggcgtaccgatggggaaataaaacagtcaaaattaaaatcttaaattagtatatacttatgtattcagagggttttgcgccctctgtttttttcgttataatagacaaagtgcattttctgcttattagacgctcgatataagaaaaagtttcatgaatatacaaaagtttttattttgtcttggaggaaataatgaaaattaaagagatcattgtggtcgaggggcgtgacgatacggcccgcatcaaattggctgttgatgcagacacaattgaaacaaatggttcagccatcgatgatcatgtgattgaccaaatccgtttggcccagaagacgagaggcgtcattattttaacggatccggactttccgggagagaagattcgcaaaaccatctcagaggctgtacccggctgtaagcatgcatttttgccaaaacatcttgccaaacctaaaaacaagcggggaattggtgtggagcatgcatcggttgaaagcattagggcatgtttagaaaatgtgcatgaggagatggaagcgcagccgagtgacatttcagctgaggatttgattcatgccggactaataggcgggcctgcggccaaatgccgccgggaacgactgggtgatctgttgaaaatcggctatacaaatggcaaacagcttcaaaaacggctgcaaatgtttcaaattaaaaaaagtgattttatgagtgcgctcgataccgttatgcgggaggaacagaatgaataaagatattgcgacaccgattagaacgaaagagatactgaagaaatacggtttttcttttaaaaagagcttaggacagaatttcttaattgatacgaacattttaaacagaattgttgatcacgcggaagtgacggagaaaacaggtgtcattgaaatcggcccgggaatcggggctttaaccgaacagcttgccaagcgggcgaaaaaggtcgtggcatttgagattgaccagcgattattgccgattctgaaggatacactgtcaccttacgaaaatgtcactgtcattcatcaggacgtgttaaaggctgatgtcaaatcagtcattgaagaacaatttcaagattgtgatgagatcatggtagttgccaaccttccttattacgtaacaacaccgattatcatgaaactgcttgaagaacatcttccgctgaaagggattgtggttatgctgcaaaaagaagtggctgagcgcatggcggctgatccttcatctaaggaatacggctcgctttcaatcgcggtgcagttttatacagaagccaaaacggtgatgatcgtcccgaaaaccgtatttgttcctcagcctaatgtcgattccgcagtcattcgtctgattctccgagacggcccggcagtggacgtggaaaacgaatcctttttctttcagctcatcaaggcaagctttgcacagcgccgtaaaacgctgctcaataacttagttaacaatctgcctgaaggaaaagcacaaaaatcaacgattgaacaagtgctcgaagaaacaaatattgacggtaagcgccgaggtgaatccctgtctattgaggaattcgcagcgctgtctaacggattgtataaagcccttttctaaaagggctttttgttttgcgcaccacatggactgccgctacataggctagagaaggacctttcattcaatgataagaaaaaacttggactcagcgaaaaaaggcgctttctcaaggctctttctttcatgatgaggcttagtctatgtgtggagtgaggaacgtgcaatttcaaataggggatatggtagccagaaaatcctatcagatggatgttttgtttcgaattataggaatagagcaaacaagcaaaggaaattcaattgccattttgcatggagatgaagtcaggctgattgctgattcggatttttctgatctggtggcagtgaaaaaggatgagcagatgatgcggaaaaagaaagatgagagcagaatgaatgagtcgctcgaattgctccgccaagattataagctgctcagagaaaagcaggagtactatgcgacaagccaatatcagcatcaggagcattatttccatatgccgggcaaagtgcttcatctggatggtgacgaagcatatttgaaaaaatgcctgaatgtctataaaaaaattggagtgccggtctatggcatccattgccatgaaaagaaaatgtctgcttctattgaagtattgctcgacaaatatcgacctgacatcctggtgatcacagggcatgatgcgtactcgaagcaaaagggcggtattgatgatttgaatgcgtacagacattctaagcactttgttgaaacagttcaaacagcccgaaaaaagatccctcacttagatcagcttgttatttttgcgggggcctgccaatcccattttgaatcactcatcagagcgggtgcgaattttgcaagttcaccgtcaagagtcaatattcatgcgcttgatccggtatatatcgtcgcgaagatcagctttacgccgtttatggaacggattaatgtatgggaagtgctccgtaatacgctgacaagagagaaagggcttggaggtattgaaacaagaggagttctgagaattggtatgccttataagtccaattaacagttgaaaacctgcataggagagctatgcgggttttttattttacataatgatacataatttaccgaaacttgcggaacataattgaggaatcatagaattttgtcaaaataattttattgacaacgtcttattaacgttgatataatttaaattttatttgacaaaaatgggctcgtgttgtacaataaatgtagtgaggtggatgcaatggcgaagacgttgtccgatattaaaagatcgcttgatgggaatttaggtaaaaggctgacgttaaaagcaaacggtggccgccgaaaaacgattgagcgttcgggcattttagctgagacgtacccttctgtttttgtgatacaactagatcaagacgagaactcgtttgaaagagtttcatacagttatgctgatattttgactgagactgttgagctgacatttaatgatgacgccgcaagctcagtggcattttaacgggcagtgaaccttttgtttactgctttttgttttgcccttttttggtttccaataattttaacgaaagttccatctgatttaacaaaagataaaacagtcacatattatcgtgacgtgcacgaatggctatcacttctaaaaaaggagttgtttcgtttgggcagacgtcgtggagttatgtcagatgagtttaaatatgagctggctaaagaccttggtttttatgacacagtaaaaaatggaggctggggtgaaattcgggcccgcgatgccggtaacatggtgaagcgtgctattgaaatcgccgaacagcaaatggctcagaatcagaataaccgataaggatgtgacccgggggacgtgctgttccctggtttttttattttggatataaatacataatgggctgaatatggatatgttcatcctgtacttcaaatgtgatacaatgttcatacttatgtttagatggagaagtaggtgaaagctatgcgtattttagaaaaagcgccagctaagatcaatctgtcacttgacgtcacccgaaaacgcccggatggctatcatgaagtcgaaatgatcatgacgacaattgatttagctgatcgaattgaattgacggagcttgcagaggatgaagtgagggtttcctcccacaaccgatttgtgcctgatgaccaaagaaacttagcttatcaggctgccaagctgatcaaggacagatacaacgtgaaaaagggagtttccatcatgattacgaaggtaattccggtggctgccggtcttgccggcggaagcagtgatgcggcggcgacactcagagggctgaacagactgtggaatttaaatctgtccgcggaaacgcttgctgagcttggagcggaaattggctctgacgtttcattttgtgtctatggcggaactgcattagcaacagggcgcggcgagaaaattaaacatatcagcacgcctccgcactgctgggtcattttagcgaagccgacaatcggtgtttcaactgctgaagtgtacagagcgctgaaactggatggtatagagcatcccgatgtacaaggcatgatcgaggcgatagaagaaaagagttttcagaagatgtgcagccggttaggcaatgtgcttgaatctgttacactcgatatgcatcctgaagttgcgatgatcaaaaaccagatgaaacgctttggtgcagatgccgtgttaatgagcgggagcggcccgacagtgtttggactggttcagtatgagtcgaaggtgcagagaatttataacgggttaagaggcttctgcgatcaagtttatgcggtgagaatgatcggcgaacagaacgctcttgattaaatccgtatgttaagttatattgatcttaaaatattcggattttgggggtgagttcatgaagtttcgtcgcagcggcagattggtggacttaacaaattatttgttaacccatccgcacgagttaataccgctaacctttttctctgagcggtatgaatctgcaaaatcatcgatcagtgaagatttaacaattattaaacaaacctttgaacagcaggggattggtactttgcttactgttcccggagctgccggaggcgttaaatatattccgaaaatgaagcaggctgaagctgaagagtttgtgcagacacttggacagtcgctggcaaatcctgagcgtatccttccgggcggttatgtatatttaacggatatcttaggaaagccatctgtactctccaaggtagggaagctgtttgcttccgtgtttgcagagcgcgaaattgatgttgtcatgaccgttgccacgaaaggcatccctcttgcgtacgcagctgcaagctatttgaatgtgcctgttgtgatcgttcgtaaagacaataaggtaacagagggctccacagtcagcattaattacgtttcaggctcctcaaaccgcattcaaacaatgtcacttgcgaaaagaagcatgaaaacgggttcaaacgtactcattattgatgactttatgaaagcaggcggcaccattaatggtatgattaacctgttggatgagtttaacgcaaatgtggcgggaatcggcgtcttagttgaagccgaaggagtagatgaacgtcttgttgacgaatatatgtcacttcttactctttcaaccatcaacatgaaagagaagtccattgaaattcagaatggcaattttctgcgtttttttaaagacaatcttttaaagaatggagagacagaatcatgacaaaagcagtccacacaaaacatgccccagcggcaatcgggccttattcacaagggattatcgtcaacaatatgttttacagctcaggccaaatccctttgactccttcaggcgaaatggtgaatggcgatattaaggagcagactcatcaagtattcagcaatttaaaggcggttctggaagaagcgggtgcttcttttgaaacagttgtaaaagcaactgtatttatcgcggatatggaacagtttgcggaagtaaacgaagtgtacggacaatattttgacactcacaaaccggcgagatcttgtgttgaagtcgcgagactcccgaaggatgcgttagtcgagatcgaagttattgcactggtgaaataataagaaaagtgattctgggagagccgggatcacttttttatttaccttatgcccgaaatgaaagctttatgacctaattgtgtaactatatcctattttttcaaaaaatattttaaaaacgagcaggatttcagaaaaaatcgtggaattgatacactaatgcttttatatagggaaaaggtggtgaactactgtggaagttactgacgtaagattacgccgcgtgaataccgatggtcgcatgagagcgattgcatccatcacgctggatcacgaatttgttgtacatgatattcgtgtgattgatggaaacaatggtcttttcgttgcgatgccgagtaaacgcacccctgatggagagttccgcgatattgctcatcctattaattcaagcacgcgaggaaagattcaagatgccgtgttaaatgagtatcatcgtctgggtgacactgaagcattagaattcgaagaagctggagcttcttaaaaaataaccaaaaagcaaggactgctgaaagggctgacataagccttttgccggcggtccttttttaattctgatttttcaaacttagttgcactcaatagaaaattcttgcacttcatgaagtctccttgaaatcagaagatatttaggatatatttttctatggataaaagggatattggaggccaataaatggataagcggtttgcagttgttttagcggctggacaaggaacgagaatgaaatcgaagctttataaagtccttcatccagtttgcggtaagcctatggtagagcacgtcgtggacgaagccttaaaattatctttatcaaagcttgtcacgattgtcggacatggtgcggaagaagtgaaaaagcagcttggtgataaaagcgagtacgcgcttcaagcaaaacagcttggcactgctcatgctgtaaaacaggcacagccatttcttgctgacgaaaaaggcgtcacaattgtcatttgcggagatacgccgcttttgacagcagagacgatggaacagatgctgaaagaacatacacaaagagaagcgaaagctacgattttaactgcggttgcagaagatccaactggatacggccgcattattcgcagcgaaaacggagcggttcaaaaaatagttgagcataaggacgcctctgaagaagaacgtcttgtaactgagatcaacaccggtacgtattgttttgacaatgaagcgctatttcgggctattgatcaggtgtctaatgataatgcacaaggcgagtattatttgccggatgtcatagagattcttaaaaatgaaggcgaaactgttgccgcttaccagactggtaatttccaagaaacgctcggagttaatgatagagttgctctttctcaggcagaacaatttatgaaagagcgcattaataaacggcatatgcaaaatggcgtgacgttgattgacccgatgaatacgtatatttctcctgacgctgttatcggaagcgatactgtgatttaccctggaactgtgattaaaggtgaggtgcaaatcggagaagatacgattattggccctcatacggagattatgaatagtgccattggcagccgtacggttattaaacaatcggtagtcaatcacagtaaagtggggaatgatgtaaacataggaccttttgctcacatcagacctgattctgtcatcgggaatgaagtgaagatcgggaattttgtagaaattaaaaagactcaattcggagaccgaagcaaggcatctcatctaagctatgtcggcgatgctgaggtaggcactgatgtaaacctgggctgcggttcaattactgtcaattatgatggaaagaataagtatttgacaaaaattgaagatggcgcgtttatcggctgcaattccaacttggttgcccctgtcacagtcggagaaggcgcttatgtggcggcaggttcaactgttacggaagatgtacctggaaaagcacttgctattgccagagcgagacaagtaaataaagacgattatgtgaaaaatattcataaaaaataatcctaaattcggaggtttatccatgtctaatcaatacggagataagaatttaaagattttttctttgaattcgaatccagagcttgcaaaagaaatcgcagatatagttggagttcaattagggaaatgttctgtcacaagatttagtgacggggaagtccaaattaatatcgaagaaagtattcgcggatgtgattgttacatcatccagtctacaagtgaccccgttaacgagcatattatggaactgctgattatggtagatgcgttaaaacgcgcttctgcaaaaacgattaacattgttattccttattacggttatgcgcgtcaagacagaaaagcaagatcccgtgagccaatcacagctaaacttttcgctaacctgcttgaaacagccggtgcgactcgtgtgattgcacttgacctgcatgcgccgcaaattcaaggattctttgatataccgattgaccacttaatgggtgttccgattttaggagaatattttgaaggcaaaaatcttgaagatatcgtcattgtttcaccagaccatggcggtgtgacacgtgcccgcaaactggctgaccgactaaaagcgccaattgcgattatcgataaacgccgtccgcgtccaaacgtggcggaagtcatgaatattgtaggtaacatcgaagggaagactgctatcctcatcgatgacattattgatactgcaggtacgattacacttgctgctaatgcgctcgttgaaaacggagcgaaagaagtatatgcatgctgtacacaccctgtactatcaggccctgcggttgaacggattaataattcaacaattaaagagcttgttgtgacaaacagcatcaagcttcctgaagaaaagaaaattgaacgctttaagcagctttcagtcggaccgcttctggccgaagcgattattcgcgttcatgagcagcaatcagtcagctatctgttcagctaaaccatttttcgaggtttaaatccttatcgttatgggtattgtttgtaataggacaactaaaacgacaagaggatggtgctgaatatggcaactttaacggcaaaagaaagaacggactttactcgttcgtctcttcggaatatccgtacttcaggacatgttccaggtatcatatatgggaaggatacgggtaacaaacctgtgtcattagacagtgtggagctcatcaaaacgctgagggacgaaggcaaaaatgcagtcattacgcttgaggtcagcggagaaaaacactcagtcatggtaacagacctgcagacggacccgctgaaaaatgaaatcactcatgctgattttcaagtagttaatatgagtgaggacattgaagtggaagttccgattcatctgaccggagaagccattggagtgaaaaacggaggcgtactgcagcagccgttatatgcacttactgtaaaggccaagccaaaagccattccgcaaacgattgaggctgatatttcaagcctcgatgtaaatgaagtactgacgattgcggatttgcctgctggcggtgactactcctttaatcatgaatcagatgaggttgtggcttcaatccttcctccgcagcagcaggaagcagctgaggtcgatgaagaggaatctgccgatgctcagcctgaaggtgaaaacgaacaataatagcttaaggcgtaaccctcccgcggttacgtcttttgtgctagaatgagaagaattatagcccgtttatgaagacgggagttatgtgactaagggaggattcgccatgcttgtgattgccggtctcggaaacccggggaagaactatgaaaatacacggcataatgtcggatttatggtgatagatcagcttgcaaaggaatggaatatagagctgaatcaaaataaatttaacggattatacggaaccggatttgtttccggcaaaaaggttctacttgttaaaccgcttacatatatgaatttatcaggagaatgtttgcggcctttaatggactactatgatgtcgataacgaagatttgacagtcatttacgacgaccttgaccttccgactggcaagatccgtttaagaacgaaaggaagcgccggagggcacaatggcatcaaatcactgatccagcatcttggaacgtccgagtttgaccgtatccgcatcggaatcggccggcctgtaaacggcatgaaggtcgttgattatgtgttaggctcctttaccaaggaggaggcacctgagatcgaagaagcggttgataaatctgtgaaggcttgtgaggcttctttgagtaaaccgtttttagaagtcatgaacgaatttaacgcaaaggtataaaatgtaacaacaaagtccatactacaccaaaatgactttttcatcaggaggacccttgtatggctttgcattattattgtcgtcattgcggagtgaaagtaggcagtctcgaatcttcaatggtatcgacagactcacttggatttcagcacttaacaaatgaggaaagaaacgatatgatttcttataaagaaaatggagatgtccatgttttgacgatatgtgaagactgccaagaggcgcttgaccgaaatccgcattaccacgaatatcacacatttattcaataaaaagctttggtgtagacactagaccaaagcgtttttctgttctcgcaggaaacagagaggaggggccatatggacaacattcaaacctttataaaagaaagcgatgactttaaatccatcatcaacggtttacacgagggcctgaaggaacagctgctcgcgggtctgtcgggttccgcgcgttctgtttttacttctgctctggctaatgaaacgaataagcctatctttctcatcacccataacttatatcaagcccagaaagtaacagatgatctgacttcacttctagaggatcggtctgtccttttgtaccccgtcaatgaactcatttcatcagaaatcgcagttgcaagccctgaattgcgggcgcagcgattagatgtcattaatagactaacgaatggagaagcgccaattgtcgttgctccggtagctgcaatcagaagaatgctgccgcctgttgaggtgtggaaaagcagccagatgctcattcaagtaggccatgatattgaacctgaccagcttgcctcacggctggtagaggtagggtatgagcggtctgatatggtttctgcgcccggggaattcagtattcgcgggggaatcattgacatttatccgctgacttcagagaatccggtgagaattgaactttttgacaccgaggtggattcaatccgcagctttaattcagatgatcagcggtcaattgagacccttacctcgatcaatatcggtcccgcgaaggaattaattatcagaccggaagaaaaagcgcgggcgatggagaaaatcgatagtggtcttgccgcgagcttgaaaaaattaaaggctgacaaacaaaaagaaatacttcatgcgaatatttctcacgataaagaacgcttgtctgaaggccagacagatcaggagctcgtgaagtatctctcatatttctatgaaaagcctgctagtttactagattatacacctgataatacacttctgattttggatgaagtcagtcggattcatgagatggaagaacagcttcaaaaagaagaagcggagtttataacaaatcttcttgaggaagggaagattttgcatgacattcgtttgtcattcagcttccaaaaaatagtggctgagcaaaaacggcctctgctgtactactctttatttttgcggcatgtacaccatacgagcccgcaaaatatcgtcaatgtgtcaggccggcaaatgcagagtttccatggccaaatgaacgtgcttgcgggcgaaatggagcgttttaaaaaatcaaatttcactgttgtgttcttaggagcaaacaaggaacgtacgcagaaattgtcatctgttttggctgattatgatatcgaggccgccatgacagacagcaaaaaagcgcttgttcagggacaggtctatatcatggaaggcgagctccaatcgggatttgagctgccgttaatgaagcttgccgttatcacggaagaagaactgttcaaaaaccgtgtaaagaagaagccgcgaaaacagaagcttaccaatgcagagcgcatcaaaagctattctgagcttcaaattggagattatgtcgttcatattaatcacgggatcggaaaatacctggggattgaaactcttgaaatcaacggcattcataaagactatttaaatatacattatcagggcagtgacaagctttacgtccctgtagaacaaattgatcaggtccaaaaatatgttggctccgaaggaaaagagccaaagctgtataaattaggcggaagtgaatggaagcgggtcaagaaaaaagtagagacatccgttcaggatattgctgatgacttaattaagctgtatgccgaaagagaagcgagcaagggctatgcgttttctcctgaccatgagatgcagcgtgaattcgaatcggctttcccttatcaagagactgaggatcagctccgttctattcacgaaatcaaaaaagacatggaaagagaacgtccgatggaccgcttgctgtgcggagatgtgggctacggtaaaacagaggttgccatacgtgccgcgtttaaggcgatcggtgacggaaagcaggtagctctgctcgttccgacaaccattttggcacagcagcactatgaaaccataaaagagcgcttccaggactatccgattaatatcggccttctcagcaggttcagaacgagaaaagaagcaaacgaaacaatcaaagggctgaaaaatggaacggttgatatcgtcatcgggacgcatcggctgctatcaaaggatgtcgtgtataaagacttagggctcctcatcattgatgaagagcagcgtttcggtgtaacccataaagaaaagatcaagcaaataaaagccaatgttgatgtattaacgttaacagcaacgccgattccgcgtacgctgcatatgtctatgcttggcgtaagggacctttcagtcatcgagactccgccggaaaatcgcttccccgtacagacgtatgttgtggaatataacggcgctcttgtcagagaggcgattgaacgtgagcttgcacgcggaggccaggtctatttcttgtacaaccgggtagaggacattgagcggaaagcggatgaaatttcaatgctagtccctgacgcgaaggtagcatatgcgcatgggaaaatgacagaaaatgaattagaaaccgttatgctaagcttccttgaaggagaatcagacgttctcgtcagcacaaccattatcgaaactggcgtggacatcccaaacgtcaatacgctgatcgtatttgacgccgacaagatgggactttctcagctttaccagctgcgggggcgtgtcggccgttctaaccgtgtggcgtatgcgtacttcacgtatcgccgggataaagtgctgacagaagtggctgaaaaaaggctgcaggctattaaagaattcacagagttaggttccggttttaaaatcgcaatgcgtgacttaacgattcgcggagccgggaatcttcttggtgcccagcagcatggcttcatcgattcggtcggatttgacctctattcacaaatgctgaaggaggccattgaggagcgtaaaggagacacagcgaagacagagcagtttgaaacagaaattgatgtcgagcttgatgcgtatattccggaaacttatattcaagacggcaaacagaaaattgatatgtataaacgcttcaggtctgtggcgacaatcgaagagaagaatgagcttcaagatgaaatgatcgaccgctttggaaactatccaaaagaagtcgaatacttgtttactgttgcagaaatgaaagtctatgcgagacaggaacgtgtcgagctgattaagcaggataaagatgctgtcagattgacgatttctgaagaagcaagtgctgaaattgacgggcagaagctgtttgagcttggcaatcaatatggcagacaaatcggactgggaatggaagggaaaaaactcaaaatctccatacagacgaaaggccgtagtgctgatgaatggctcgacaccgtgctgggcatgctgaagggcttaaaagatgtgaaaaagcaaaccatttcatcaacgtaaattttgttactctctggtgtatattacatttgatgtgacggatactaatttcaagcgaggcggaaggtacataaagtaactgctttaggtctttcccacatgtatataccatcaaatgaaagagaggcaccagagatgaaagcaaccggtatcgtacgtcgtattgatgacttaggtcgggtcgtgattcctaaagaaattcgaagaactctgagaatcagggaaggcgatccgcttgagatttttgtagatcgtgacggagaagtgattttgaaaaagtactctccgatcagtgagcttggagactttgcaaaggagtatgcagacgcgctttacgacagcctcggccattcagtgctgatttgtgatcgtgatgtatatattgccgtgtccggcagctccaaaaaagattacttaaacaagtcaatcagcgaaatgctggaaagaacaatggatcagcgcagctccgtgcttgagagtgatgcgaaatcagtacagcttgtgaatggaattgatgaggacatgaattcttatactgtaggcccaattgtggcgaacggtgatccgataggtgctgtggtgatcttttcaaaagatcagacaatgggcgaagtagagcataaagccgttgaaacagcagctggatttttggctcgtcaaatggaacagtaggtcttattcctttcttcgaaaataggtatgtaaagaacagctctccttgggacgctgttctttttcatgcgtgccgaaaaaggaatccaagggttgggatgtggtataataacctcgtttttatttgtgccgcggtaatacgtgaaccgtattgcccctgacgttgggaaggagcttttggatggacgattcaataggcgttaaacggcattggatttggcagggggcttttgttttaattctggcaggcgtcatcacaaaaattttaagcgctgtttacagagtcccgtttcaaaacattgtcggcgatgttggattttatatatatcagcaggtatacccctttcttggtattgcggtcatgctgtccacatcaggatttccagtcattatttcaaagctgatgaatgattatagtgaaaaaaatcatcacaccatattaaaaatatcagcgttgtttttgtctttaatcggtattttattatttctttgtttatatctgggtgctgttcctattgcactctttatgggagattcgcatctagccgtgttaattcaagtggccgcatacgcgtttctgcttttcccatttgtcgcgttgctaagaggcggttttcaggggcggcacgaaatgctcccttcagccttatcacagatgacagagcagtttctgcgtgttgcggtgctcttgggtttatcattttggctcgtgaaaaagggagcctcgctttatactgcgggagcggcagccgcttcaggctctcttgccggaagtttggttgcattgataatactggggtttttttggttcaaaacgaaaagagacaaccaaacggataggcaaaacgaaaatgtcatcacaacaaaagaattgacgaaaaaactgcttttatattcggtcacaatttgtgtaagcagtttgctgcttttgtttatccagcttgttgatgctttgaatttatatgcattgctttcgggtggtgaggcaagcgaagaagcaaaatgcctaaaggggatctatgatcggggacaacccttgttgcagctcggttcagtttttgccgtaagcattgcgacgtcactcgttccgtatatttctatggctgtaaaaaacaaagagctgaagatcatgaaagaaaaaatcacgtcatctttgaaactatgccttgtgctcggtacaggcgcatcggctgggttgatttgcattctaaagccggtaaatatcatgctgtttcaaaatggagaagggacaggtgcgttacaagtatttagctgctccattttgtttgcatccttggcggtaacggcagcggcagtcttacagggagcgggatacacagtttttcctgcgatagcggtgggcgcgggtgttgcggtgaaatgggtgttaaacacacttttggttccgcgctatgggattgaaggcgcatcgcttgcgacagcggcttcctttgcggctgtcgccggccttaacttgtatcagcttcggcaaaaggaatggctcgataagcttagaggcgttttgattccgattattggatctgctcttttgatgtcagctgttttgcttgcgtatacgcgtctctggactttcttgtttcctgcaacaggaagaggagcggctgtgattgagagtctttctgctgttgccattggtggcgcggtgtttatttattgtatgatgagattgggaatatttacagatgaagagctgaacagtgtgccattcggcagcaagttaagcaaattcatgagaaggagagaacaaaatggcgggtaaaattacagtcgtcggacttggtgccggagacatggaccaattgacaattggtatacacaagctgctgacgaaggcagatacgctgtatgtcagaaccaaggatcatcctttaattgaggagcttgaaaaagaaacgaagaacatccgtttctttgatgatatatatgagaaacatgatcagttcgaggcggtatatgaagaaattgcagatatcctctttgaagcggcgcggcgtgaggacgtggtttacgctgtgccgggacacccttttgtcgcagaaaaaacagttcagctgctgacggagcggcaggaaaaggaaaacgttcaagtgaaagtcgcggggggacaaagtttccttgatgccacattcaatgtcttgcaaattgacccgattgaaggttttcaatttgtggatgccggcacattgtccgcggatgagcttgagctcagacatcatctgatcatatgtcaggtttacgaccaaatgacggcttctgaagtcaagctgacattgatggagaagctgcctgatgattatgaggtcgtcattgtgactgcagcaggcagccgtggcgaggagatcaggacagtgccattatttgagctggaccgcaatgtcgctttgaacaacttaacaagtgtgtatattccgccgattaaagaagagaagctgctttatcacgaattctccacgttccgaagcatcatcagagagcttcgcggacctaatggatgtccgtgggataaaaagcagacgcatcagtcattaaagcagtacatgattgaagaatgttatgagcttctcgaagctattgacgaagaagacacagaccatatgatcgaagagcttggcgacgttttgcttcaggtcttgcttcacgcgcaaattggtgaagatgaaggttatttcacaattgatgatgtcataaaaggaatcagtgaaaaaatggtccgaagacatccccatgtgtttaaagatgttaaggttcaggatgaaaacgatgttttagccaattgggaagatataaaaaaggccgaaaaaaatacatctgaatcatcattactagacagcgtaccgaaaacccttccagctctttcgaaagcagctaaattgcagaaaaaagcagcgaaggtcggttttgactgggaagacgtcagcgatatttgggaaaaggtaagtgaggaaatgaaggaattttcttctgaggtttctgaagctcctcacgaacacaatcttaaagctgagtttggcgacattttgttcgcgctggtgaatgtagcccgcttctacaaaatagagccagaggaagcgctgaccatgactaatgacaaattccggagacggttctcgtacattgaggaaacagcgaaggaagagggagtcgagttggctgatatgtcccttgaggacatggacaaactgtggaatgaagcaaaagaaactgagaggagatcatagatatgagattagataaatttttgaaagtatcacggctgatcaaacggcgtacactagcgaaggaagtagctgaccaaggacgaatctctattaacggaaaccaagctaaagctagctctgacgtaaaaccgggagatgaactaacggtccgcttcggccaaaagcttgtaacggttcaagttaatgaattgaaagacacgacgaaaaaagaagaagctgcaaacatgtacacgattctaaaagaagaaaaactcggcgaataggcttgttctaaaaaaaccccccacctcatacaatgcagtaataatgctaaaagtatcgaggatatgggggctgaatagatgaattcatattatgatcaaaaaggttcttcgtctgttccggaacagcatgatgtgacaatgaaaggccggaagcatttagatatttctggggttaagcatgtggagagttttgataacgaagaattcctgctggaaacggtgatgggaatgctctccgtcagaggccaaaacctgcagatgaaaaatcttgatgtggaaaaagggattgtttcgattaaaggcagggtatttgatttagtgtacttagacgaacaacaaggggataaagctaaagggttttttagcaagttgtttaaatgacgctgacgacacaattctatacaatgctagcgatgtccggtatgggtctctggcttggtgcttcgcttgatacataccggctctttgtcattcgtgccaaaacagccagatggctattatttattcatgatattcttttctggattatgcaagggctgcttttcttttatgtcttgcttcatgtaaatgagggagaattcaggatttacatctttttagcggttctgctgggcgttgcgacgtatcagagcctttgcaaacgaatctatataaaaatactgaaattcgtcatttaccttgttgtttctgtttatcaattcttcaaaaaactcattcagcacgtgttatttcgtcctattgtgtggacatgcggagcgatcatctggctggcggcatttttattcaagaaaacatacagcctgataggttttctcctgctgtgtctatataaaatagtcatggttctgtgttttccgatccgttttatcgcgaaacaatgtttgaaacttcttcctgtgaaaatgcgtctaacttttagacgttattttgaaaaaggtgcaggatttctcaaaaagaagaagaaactattgataaccataagaacgaccatcacacggtttttgaagagatgaaaggaggaccgtctggtttgaatttttccagggaacgaacgataactgaaatacaaaacgactataaagaacaagtagaacggcaaaatcagctgaagaaacgaagacgcaaagggctgtacagacggttaactgtattcggcgccctagtattcctgacggcaattgtgctggcaagctctgtatggtcccaaacatcttcccttagtgcaaaagaagaaaagaaagaacagcttgaaaaagaactgaaaagtttaaagacaaaacaaacggatttaaaagaagaaatatccaaattgaaggatgaggattacgtcacagagcttgccagaagggacttattcatgtctggagacggagaaattatcttcaatgtggagaagaagagcaagtagccttgttgacacttaaatttttatttaggtataattaagcaaacgatctttttataagcctaaggaggagcactttttttatgtcgattgaagttggcagcaagttgcaagggaaaattacaggtattacaaattttggagcatttgttgaattgcctggaggctcaaccggtctcgttcacattagtgaggtagctgataattatgtcaaagacattaacgaccacttaaaagtcggcgaccaagttgaagtgaaagtcatcaacgttgaaaaagacgggaaaattggtttatctattaaaaaagctaaagaccgtccgcaagccagacctagaaatgatttccgtccgaaagaatcttttgaacagaaaatgaataagtttttaaaagacagcgaagatcgcttgtcatctttaaaacgcaatacggaatcaaaacgtggagggcgcggagcaagaagaggataacttgctgctttctataaaataaatgaagcatccgttcatcccgacggatgcttttttattatcctcattctctttaagagtcagaaaattacaacattaaagtttctgttgacgaaagagacaaacctttgtattatataacttgtgcttagaagcacaaaacaatatggcggtgtagctcagctggctagagcgtacggttcatacccgtgaggtcgggggttcgatcccctccgccgctaccatatttgtttggcccgttggtcaagcggttaagacaccgccctttcacggcggtaacacgggttcgaatcccgtacgggtcatcctaacaaatcggtttctcttgcagaagccgatttttttcatttttagacaacattccggaaattcttttcataaacgaatatcaaggcagaaaccgtcgaagatttctttggtattgttaccttcttttgacaaaatcctatctgtgctttcgctataatgacaggcaacgaatataacaggtgggagatgagaggaatggaaaaagcagaaagaagagtgaacgggccaatggcgggacaagctttggaaaaactccaatcgttttttaacaggggcacgaagctggtgactcatcatttgcattcactgtttttctataaaggattcatttatgttgtcatcggatttttgcttggacgggctttcatattatccgaggtgcttcctttcgcacttcctttctttggagcgatgcttcttatcagaagagacaaagcgttttatgcggttttggctgtgcttgcaggtgcgctgaccatatctccaaagcactcattgctcatactggcggcattgctggcattcttcgtattttctaaagtggctgccttcattaccgacgatcgtgttaaagcgctcccgattgtcgtgttcttctccatggctgcagcaagagccgggtttgtttatgcccaaaatggcgtatttacaacctatgattatgtaatggctatcgttgaggctggactatcgtttatcttaacactgattttccttcagagccttccgatttttactgtgaaaaaagtgaaacaatcattaaaaatagaggaaatcatttgctttatgattcttattgcctctgttttaacggggctggctggcttgtcctaccaagggatgcaggcagaacatatattggctcgttatgttgtgttgagtttttcctttattggcggagcaagcatcggctgtacggttggggttgtgaccggcctgattcttggcttggcgaatatcggaaacctatatcaaatgagtctgcttgctttttccggtttattgggcggtttgctgaaggaagggaaaaaagcgggtgcagcaattggtttgatcgttggatcacttcttatatctttatatggtgaaggctctgccggtctgatgacaacgctctatgagtcattaatcgcagtctgcctgtttttgctcacacctcaatctattacgaggaaagtggcgagatatattccgggaactgtcgagcatcttcaagagcaacagcaatacgctagaaaaatccgtgatgtcactgctcagaaggtagaccaattctccaatgtatttcacgcgctgtctgaaagctttgcaaccttttatcaagcatcagacgaacagacagatgacagcgaagttgatctgttcttaagcaaaatcacggagcattcctgccagacgtgctacaagaaaaacaggtgctgggtacagaactttgataaaacatatgacttaatgaaacaagttatgcttgaaacagaggaaaaagaatatgcatcaaaccgaaggctgaaaaaagagtttcaacagtattgttctaaatccaagcaggttgaagagctgattgaggatgagctcgcacatcatcatgcccatttgacactcaagaaaaaagtccaagacagcaggcgccttgttgctgaacagcttttaggcgtttctgaggttatggccgacttttctcgggaaataaaaagagagcgagaacaacactttctgcaggaagagcaaatcatagaagcgcttcagcatttcggaattgagattcagcatgtcgagatctatagtcttgaacaaggaaatatcgatattgaaatgaccattccgttcagcggacatggagaaagtgaaaaaatcattgctcctatgctttctgacattctggaggaacaaattcttgtgaaagccgaacagcactctccgcatccgaatggatacagccatgtcgcctttggatcaacaaaatcatacagggtgtccacgggagctgctcacgctgcgaagggcggcggccttgtctccggtgacagctacagcatgatggagcttggagccagaaaatatgctgcagcaatcagtgacggaatgggcaatggcgcaagagcgcactttgaaagcaatgaaacgatcaagcttcttgaaaaaatccttgaatcgggcattgatgaaaaaatagcaattaaaacgatcaacagcatactgtctctaaggacaactgacgaaatatattccacgcttgacctatctattatcgatcttcaagatgccagctgtaaatttttgaaggttggatcgacgcccagctttatcaaacggggtgaccaggtcatgaaagttcaagcgagcaatctgccaatcggtattattaatgaattcgatgtggaggttgtgagtgaacagctgaaagcgggtgacctcttaattatgatgagtgatggcatttttgaggggcctaagcatgtggaaaatcacgacttatggatgaagcgtaaaatgaaagggttgaaaacaaatgacccgcaggagattgccgatttgcttatggaagaagtcatccgcacaagatccggccaaattgaggacgatatgactgttgttgtcgtccggattgatcacaatacaccgaagtgggcatccattcctgttccggcaatctttcaaaacaaacaagaaatttcataacgcttccgtataaatcaaatttcttctggcgaagatgggaatatatgaatctgagaatcctcgtattctccaggaggaatgaatgtgaacaacggacatttaaatcaaattttgctgataacggatggctgctcaaaccatggggaagacccgcttgcaatggctgcttttgctaaagagcaggggattacggtaaatgtcattggtataatggaagaaaatcaaattgaccctgaggcaatgaaggaagtcgaagggattgcacttgccggaggaggcgtgcaccaagtcgtttatgcatctcagctttcacaaactgttcaaatggtaacaaagaaagcgatgacgcaaaccttacaaggtgtagtcaatcaagaactgaaacagattctcggaaagaatgtggaaatggaagagctttctccggaaaaacgcggcgaagtcatggaagtggtagacgagcttggagaaacggtgcatcttcaggttttggttcttgttgatacaagtgcaagtatggcgccaaagcttccaacagtaaaagaggcgctgattgatttgtctgtaagcctcaattcccgaattgggaataacgaatttgcgatgtgtatatttcccgggaaaaaacaagaggtcgagcttgtgctgaactggacaccgaagctgcaatctctttccacactctttgcaaagctttcgacaggcggcatcacgccgacaggtccggcgattcgtgaagcgacactgcagtttgaaaaaatacgctcaagaaggggcatgctggcagatgatgaacgacgctttgacgagtttggcatgtagcctcaagccgggtacgacaatcaaaggcaagtggaatggaaacacttatacattgcgtaaacagcttggtaaaggggccaatggaattgtgtatttggcagaaacatcagatggacatgttgccttaaaggtgagtgatgacagcctgtctattacttctgaagtgaatgtcttgaaatctttctcaaaggcccagtccgttacgatggggccttctttttttgatacggatgatgcctatattcccagtgccaatacgaaagtttcattttatgcaatggaatacataaaagggccgctgcttttgaagtatgtcagtgataaaggagcagagtggataccggtattaatgattcagctgttatccagcttatcggtgcttcaccagcaaggatggatattcggcgatcttaaacctgataatctgatcgtaactggtccgcccgcaaggatccgctgcattgatgtgggcggcacgacaaaggaaggccgggcgataaaagagtatacggagttttatgacagaggctattgggggtatggaacaagaaaggcagagccatcctatgatctgttcgcagttgccatgattatgatcaacagtgtgcataaaaaagaatttaagaaaacgaaccagcccaaagaacagcttaggtctctcatcgaaggaaacccgctgcttcaaaagtataaaaaagcgcttttttcagccttgaacggagattatcaatccgcagatgaaatgaaaaaggatatgctagacgcggggcaaaaagcagcacaaagaaaacagcctataaaagcatcaccgcagcctgccacacgacaaagacagcaaaaaccgcgccaaggaaaaataacgaagacgcgatataccccaaaacagaaaccggctaagtcgggggggttatttgaaacaacgcttatcgtgatcagtgttttagcgctttatttcgcctatattatctttttcttaatctgaatggtgcaaactgcagagcctatgcttcttctttgcttggaggggttgaaagtgttaggatatgaatatctttaaaatacctgctcattgtgaggaggacattgtgaaaagtgtcaaagattttttaaacaaacacaatcttacgttaaaaggggcgacaatcattgtaggcgtttccggcggtccggactcaatggctcttcttcacgcgttgcatacgttatgcggccgttcagcgaatgttattgcagctcacgttgaccatcggttcagaggtgcggaatccgaggaggacatgcgttttgtccaagcttattgtaaagctgaacagctcgtgtgcgaaacggctcaaatcaatgtaaccgcatatgcacaggaaaaaggactcaataagcaggctgcagcacgcgattgccgctaccagttttttgaggaaatcatgtcgaagcaccaagcggactatctggctcttgcgcatcatggtgatgaccaggttgaaacaatgcttatgaaactggctaagggtacgcttggaacgggacttgcgggaatgcagccggttagacgttttgggacagggcggatcatcaggccgttcttaaccattacaaaggaagagatccttcactattgccatgaaaacggcttgagctaccggacggatgaaagcaacgccaaagatgactacacaagaaacagattcagaaaaacagtgctcccgtttttgaagcaggaatctccggatgtgcataaaaggtttcagaaagtgagtgaagcactgacggaagatgagcaattcttacagtcattaacgaaagatgaaatgaataaagtaatcacaagccagtctaatacatcagttgaaatcaattcctctcaattgcttgccctcccgatgcctttacaaagaagaggagttcaactaatattaaactatctttatgaaaacgttccatcatccttttcagcccatcacattcagcagtttctcgattgggcggaaaatggcggtccttcaggagtactggactttccgaaagggctgaaggtggtcaaatcatatcagacatgtttgtttacatttgaacaatggcagtgcaaaaatgttccctttgaataccaaattagcggagctgctgatgaaacggcagtgctccctaatggatatctgatagaggcaaggcattatgcggactcgcctgaagaacatgggaatgctgtttttatcacaagtgaaaaaaaggtgcgatttcccttaacaatccggacgagaaaagctggagaccggatcaaactaaaagggatgaacggctcaaaaaaggtaaaggatatatttattgataagaaattgcctctccaagaaagagacaactggccgattgtgacggacgcaagcggtgaaattatctggatacctggcttgaaaaaatcaatttttgaagatcttgtgattccaaacagcgaccgcattgtattacaatatagacagcatgaaaagtgtagggggcaagcaaaatcatgatgaaacatgatatcgagaaagtactgatctcagaggaagagatacaaaagaaagtaaaagagttaggtgcagaattaacgagcgagtatcaagatacatttccgttggcaatcggtgtgttaaaaggagcacttccttttatggcggatcttatcaagcatattgatacatatttggaaatggatttcatggatgtatcaagctacggaaattctacggtttcttctggagaagtaaaaatcattaaagatttggatacatctgtagagggccgggacatcttaattattgaagatatcatcgacagtgggttaaccttaagttatctcgtagagctcttccgataccgtaaagcaaaatcaattaagattgttacccttttggataaaccgagcggaagaaaagcggacatcaaagcagactttgtcggttttgaagttcctgacgcgtttgtagtgggttacggacttgattatgctgagcgctatcgcaatctgccttatatcggagtgttaaaaccggcagtttatgaaagctgatcggcagcctgcttccgagatggttattgtttgtattggaatgattttctatggtactattgaacatagttgtgcttactgtgggaggaggtaaggaatgaatcgggtcttccgtaataccattttttatttacttattttattagtagtaatcggggttgtgagctacttccagacctcaaatccgaaaacagaaaatatgtcgtacagtacgttcatcaaaaacctggatgacgggaaagttgatagcgtatcggttcagcctgtcagaggtgtttatgaggtaaaagggcagctgaaaaactacgacaaagatcaatactttttgactcatgttcctgaaggaaagggagcagaccagatatttaacgctttgaaaaagacagacgtaaaggttgagcccgcgcaagaaacaagcggatgggtgacgttcctgacgaccatcatcccatttgtcattatctttattctgtttttcttcctgctcaatcaggctcaaggcggcggcagccgtgtcatgaactttggcaagagtaaagcgaagctgtatacagaggaaaagaaacgcgtcaaatttaaagacgttgcaggggctgacgaagaaaagcaagaacttgttgaagttgttgagtttctgaaagatccccgcaagtttgccgagctcggcgccagaataccgaaaggcgtgcttttagtcggacctccgggtaccggtaaaacattgcttgccaaggcttgtgcaggagaagccggcgtacctttcttcagcatcagcggatctgatttcgttgaaatgtttgtaggggtcggtgcttcccgtgtgcgtgacttgtttgaaaatgcgaaaaagaatgcgccttgtttgatcttcattgatgaaattgacgcagtcggacgccagcgtggcgctggtctcggcggtggacacgatgaacgtgaacagacgctaaaccaattgcttgttgaaatggacggattcagcgctaatgaaggaattatcatcattgctgcgacgaaccgtgcggacatcttggacccagccttacttcgtccgggacgttttgaccgtcaaatcacagtggaccgcccagatgtcattggccgtgaagctgtattgaaagtccatgcgagaaacaaaccgctggatgaaacggttaacctaaaatcaattgccatgagaacaccaggcttctcaggcgctgacttagaaaacctcttgaatgaagctgcgcttgtagcggctcgtcaaaacaagaaaaaaatcgatgcgcgtgatattgacgaagcgacggaccgtgtaattgccggacccgctaagaagagccgcgttatctccaagaaagaacgcaatatcgtggcttatcacgaaggcggacacaccgttatcggtctcgttttagatgaggcagatatggttcataaagtaacgattgttcctcggggccaggctggcggttatgctgttatgctgccaagagaagaccgttatttccaaacaaagccggagctgcttgataaaattgtcggcctcttgggcggacgtgttgctgaagagattatcttcggtgaagtcagcacaggggcgcacaatgacttccagcgtgcgacgaatattgcaagacgaatggttacagaattcggtatgtcagaaaaactgggaccgttgcaatttggacagtctcagggcggtcaggtattcttaggccgtgatttcaacaacgaacagaactacagtgatcaaatcgcttacgaaattgatcaggaaattcagcgcatcatcaaagaatgttatgagcgtgcgaaacaaatcctgactgaaaatcgtgacaagcttgaattgattgcccaaacgcttctgaaagttgaaacgcttgacgctgaacaaatcaaacaccttatcgatcatggaacattacctgagcgtaatttctcagatgatgaaaagaacgatgatgtgaaagtaaacattctgacaaaaacagaagaaaagaaagacgatacgaaagagtaattcgctttctttctaaaaaaactgccggctgacgctggcagtttttttatgtaaatgattggctcagctgcggcttttacaatcatccaattctggtatcgatttgtttacaaatgagccgctgatcgtgtatggtattgtagaatgtttgtaaaaagtaaagtagagaaactattcaaaagtggtgatagaggttgttactggttatcgatgtggggaacaccaatactgtacttggtgtatatcatgatggaaaattagaatatcactggcgtatagaaacaagcaggcataaaacagaagatgagtttgggatgattttgcgctccttatttgatcactccgggcttatgtttgaacagatagatggcattattatttcgtcagtagtgccgccaatcatgtttgcgttagaaagaatgtgcacaaaatactttcatatcgagcctcaaattgttggtccaggtatgaaaaccggtttaaatataaaatatgacaatccgaaagaagtaggggcagacagaatcgtaaatgctgtcgctgcgatacacttgtacggcaatccattaattgttgtcgatttcggaaccgccacaacgtactgctatattgatgaaaacaaacaatacatgggcggggcgattgcccctgggattacaatttcgacagaggcgctttactcgcgtgcagcaaagcttcctcgtatcgaaatcacccggcccgacaatattatcggaaaaaacactgttagcgcgatgcaatctggaattttatttggctatgtcggccaagtggaaggaatcgttaagcgaatgaaatggcaggcaaaacaggaaccaaaggtcattgcgacaggaggcctggcgccgctcattgcgaacgaatcagattgtatagacatcgttgatccattcttaaccctaaaagggctggaattgatttatgaaagaaaccgcgtaggaagtgtataggaggtttagtaatggattatttagtaaaagcacttgcgtatgacggaaaagttcgggcttatgcagcgagaacgactgatatggtaaatgaggggcagagacgccatggtacgtggccgacagcatccgctgcactaggccgtacaatgacagcttcacttatgctcggcgctatgctgaagggcgatgataagctgaccgtgaaaatcgagggcggaggtccgatcggagctattgtagctgatgccaatgccaaaggagaagtcagagcctatgtctctaacccgcaagttcattttgatttaaatgaacaaggtaagcttgatgtcagacgtgcggttggaacaaacggaacgttaagtgtcgtaaaagatttaggtttgcgcgagttcttcacaggacaagtagaaatcgtttcaggagaattaggagatgattttacttactatcttgtgtcatctgagcaggttccttcatcagtgggcgtaggtgtgctcgtaaatcctgacaataccattcttgcggcagggggctttattattcagctgatgccgggaacagatgatgaaacaatcacaaaaattgaacagcgtctatctcaagtagagccgatttctaagctcatccaaaaagggctgacaccagaagaaattttagaagaagtcctaggcgagaaacctgagattttggaaacgatgcctgtcagattccattgcccttgttcaaaagaacggttcgaaacagccattttaggactaggcaaaaaagaaattcaagatatgatagaagaagatggacaagccgaagcagtatgccatttttgtaatgaaaagtacttatttacaaaagaagagctggaagggcttcgtgaccaaactacccgctaagctctttagcgggtttttaatttgagaaaaggggctgaaagcaggtttgaaatcaagaacaatctggaccattattttaggggcgctgttggtttgctgtattgctgttgcatatacgctgacgaaatcccaagccggcgcatcgtcatccggtgagtctattgcgactatcggaggcaagagtgtgacaagagaagaatggctgaaagaaatggaagatcagtatggtaagtcaacgcttgaagatatgatcaatgtccgagttgttgagcagctggctaaaaagaacaaacttaaaatatccaaaagcgaagttgatcgtgagtttttgctgattaaagcggtcaataattccttttacgaagatgaacatacgacggagaaagagtggaaagaccaaattcgttataatatcctccttgaggatttgttaacaagggatatcgatatctcaaacaaagaattggaatcattctataataaaaataaggaactatatcagtttgatgattcgtatcgaattcggcacattgttgtaaaagatgaagaagaagcaagagaagtcctgaaagaactgaaaggcggatcaagctttgaagctgtcgctgccgaaagatctacagacagatatacatcaccatacggcggagatttaggttttgtcacagaggcatcagacaacattccatcagcatacattgaagaggcgaaaacactcaaagaggatgaatggtctcaggaaccaataaaggtcagcaacggatatgccattatccagctgaaagaaaaactaaaggcaagaacgttctcatttgatgaagtaaaggaccagatcagacggcaaatcgcaatggatcagctaggcgataaagcgacagttaagacactttggaaagaagccgatgtatcttggttttatggggaaaaaagtactaagtgattgacaaaaaattttgaaattgatagattatatacataataccaatacaaatagtcggaaattgaggtgtcgagaatggtacgtgtagcaaactccattactgaattaattgggaatacgccaatcgttaaattaaatcgccttgcagatgaaaacagtgcggatgtatatctaaaacttgaatacatgaaccctggaagcagtgtaaaagaccgtatcggtttagctatgattgaagcggctgaaaaagaaggaaaattaaaagccggtaatacaatcattgaaccgacaagcggaaatactggaatcgggcttgcaatggttgctgctgctaaaggattaaaagccattttggttatgcctgatacaatgagcatggagcgccgcaaccttcttcgcgcatatggtgctgagcttgtgctgactcctggtgcggaaggcatgaaaggtgctattaagaaagctgaagagcttgctgaaaagcacggatactttgtgccgcagcagtttaacaacccttctaaccccgaaattcaccgccaaacaacgggtaaagaaatcgttgagcaattcggtgatgatcagcttgacgcatttgtagccggaatcggaacgggcggaacgattacgggagcgggcgaagtgctgaaggaagcatacccttccatcaagatttatgctgttgaaccgtcagattccccagtgctttcaggaggaaaaccaggcccccacaaaattcagggaatcggagcaggattcgtgccggacatcttaaacactgaagtatatgatgaaatcttccctgtgaagaatgaagaagcattcgaatatgcccgcagagctgcacgtgaagaaggaattctcggaggcatctcatcaggtgcggcaatttatgctgctcttcaagtagcaaaaaaactcggaaaaggcaaaaaagtattggccatcattccaagtaacggcgaacgttatctaagcacgccgctgtaccaattcgattaaaaaaagccaaaactcccggttcgccgggagtttttttatatttcgtgcatcaaatatgccatgtctgcgacgaatgttattcttggaagagaaattcacttttttcactaacaacattgctttacaattaaaaacaagtaaaaaagaaaatagaggaatgatacaaatggcacaacgcagaccggcaggcaaaaaaataccttttcaaaaagactcattcttacaacaatttgagaaacttgcgcaatcccggaaacatcatgtacttctcgaaagtgcaagaggcggcagatatagtatagccggtcttgatccaattgcgactgtgaaaggaaaagacggaataactacaattaagcatggtgatgagatgctgtttaaagaaggtgatccattacgggccttccacagctggtttaaaacactggaaacagaaacgaatcatgagttccctgactttcaaggcggggcaatcgggtttctcagctatgattacgcacggtacattgaaaattttaaaatgctctcattagatgatttagaaacaccagatatttattttcttgtttttgatgatatagcagtttatgaccatcaagaagagtctctatggctgattactcatgttaatggttctgatcaggaaacagcggatgtgaagctatctgagttagagcagatgtggttgactgagcttcccgctgtcacttcgcgagagatgaagcctgaaacagctggttctttcgcggcgccatttaccgaggatgggttctcacaagctgtagagaaaatcaaacaatacattgccagcggagatgtgtttcaagtcaatctatcaataaggcagtcacagtcactgtctgtccacccatatcaaatttacaaaaccttgagagaagtaaatccttctccttatatggcgtatttagaaacacctgatttccaaatcatttgcggatcgcctgaactgcttgtcagcaaaaagggcaagctattagagacgagaccgattgcgggcacccgttccagagggaaaacaaatgaagaagacgaggcgcttgcaaacgaattgatacacaatgaaaaagaacgcgcggaacatgtcatgctggttgatcttgagcgaaatgatctgggaagagtatcacgttacgggtctgtgcgcgtaaatgaattcatggcaattgaaaaatactcgcatgtgatgcacattgtgtctaatgtccaaggtgaactgcaggatgggtatgatgctgtagatattattcatgctgtgtttcccggaggaaccattactggtgcaccgaaagtaagaacgatggaaattatagaagaacttgagccgacacgccgagggctttatactggatctataggatggtttggatataatcacgatctgcagtttaatatcgtcattcgaaccatttatgcaaccggagggcaggcatttatgcagtccggtgcaggagttgtgattgattctgttccgaagcacgaatacaaggaatcattcaaaaaagcttttgcgatgcaaagagcattagagctgagcgaagaagagacaaaaattagatgaggtgagcggagaaatgattttaatgattgataactacgattcattcacgtacaacttggtacagtatttgggcgagcttggggaagagctggttgtgaaacgcaatgacagcatcacaatcgatgaaattgaagaactgtctccggactttctgatgatatctcccggaccgtgcagccctgatgaggcgggaatcagcctcgaagcaattaaacatttcgcagggaaaattcctattttcggtgtatgtctcggacatcagtccatcgcacaagtgttcggtggtgatgttgttagggcagaacggcttatgcacgggaaaacctcggatatcgagcatgacggcaaaaccatttttgaagggttgaaaaatccccttgttgcgacgcgataccactcgctgatcgtaaaacctgagacgctgccaagctgttttacagtaacagcacaaacgaaagaaggagaaatcatggctattcgccacaatgacctcccgatagagggtgtgcaatttcacccagagtctattatgacctcctttgggaaagaaatgctcagaaattttattgagacatatcgcaaggaagttattgcgtgatgatatatgtgaacggccggtatatggaggagaaagatgcagttctttctccttttgaccatgggtttttatatgggatcggtgttttcgaaaccttcaggctctacgaaggctgcccgtttttgcttgattggcatatagagaggcttgaacgcgcgcttaaggatctgcaaatcgaatatactgtttcaaagcatgagatccttgagatgctggacaagctgcttaagctaaatgatatcaaggatggcaatgcccgcgtcagactgaacatatcagcgggaatcagcgataaaggctttgtcgcccagacgtacgataagcccaccgttttatgctttgtgaatcagctgaaaccagaaagtcttcctttgcaaaaagaaggaaaggttttatcgatacggagaaacactccagagggatcgttccggttaaaatctcatcattatctaaataatatgtatgcgaaacgggaaattggaaatgatccgcgtgtcgagggaattttcttaacggaggatggagctgttgcagagggtatcatatctaatgtcttctggagaaaaggtcgctgtatctatacgccatcgcttgataccggtattctggacggcgtcacgagacgttttatcatagaaaatgcaaaggatatcggcctggagctcaaaacgggccgatatgagctagaagctctcttgacagctgacgaagcgtggatgacgaactcggttcttgaaatcatcccgtttactaaaatagaagaagtaaactatggaagccaaagcggagaagcaacctccgctcttcaattgttatacaaaaaagaaataaagaacatgattcatgaaaagggaggaagagcatggcgcagcacacaatagatcaaacacaagtaatccacactaagcccagcgctttatcatataaagagaagacgctggtgatgggaattttaaacgtaacgcctgactctttctcggacggcggaaaatatgacagcttggacaaggcgctgctgcacgcgaaagagatgatcgatgatggtgcccatatcattgatattggaggggaatcgacaaggcctggcgctgagtgcgtatctgaggatgaggagatgtccagagtcattccggtgattgagcggattacgaaagagcttggtgttcctatttctgtagacacgtacaaggcttctgtcgcagatgaagcagtgaaagccggtgcatccattatcaatgatatttggggagccaaacatgatccgaagatggcttccgttgcagctgaacataatgttccaattgtactcatgcataaccgccctgaaagaaactacaatgacttattgccggatatgctgtcggacttaatggagagtgtaaaaattgctgttgaggccggagtagacgagaagaacattattcttgatcctggtatcggtttcgcgaaaacctatcacgataacttggcagtgatgaacaaactagagattttcagcggattgggatatccggttcttctggcaacctcccgaaaaagattcatcggacgtgttctggatcttccgcctgaggagcgggctgagggcacaggcgcgactgtgtgtctcggcattcaaaaaggctgtgacattgtcagggtccatgatgtaaagcaaattgccagaatggcgaaaatgatggacgcgatgctgaataagggaggggtgcaccatggataaagtttatgtagaaggtatggagttttacggatatcacggtgtgttcacagaagaaaacaaacttggccagcggtttaaagtcgatttaaccgctgagctggatttaagcaaagctggacagacagacgaccttgagcaaacgatcaactatgctgagctctatcacgtatgtaaagatatcgtggaaggggagcctgtgaaattggtggaaacgctggcggaacgtattgctggcactgttctcggaaaatttcagcctgttcagcaatgtacggtgaaagtgattaagccagacccgccaattcccggacactataaatcagtagcaattgaaattacgagaaaaaagtcatgaacaacatagcttatattgcacttggatctaatattggagatagagaaacgtatttaaggcaagcagtggctttactgcatcagcatgctgcggtgacagtcactaaagtgtcgtctatttacgaaactgacccggtcggatacgaagatcaagctcaatttttgaatatggctgttgaaatcaagacatcattgaacccttttgaactccttgaactgacgcagcagatagaaaatgaattaggcagaacaagggaagtaagatgggggccgcggacggcagaccttgacattttgttatttaatcgtgaaaatattgaaacagagcaactaattgttccgcatccgagaatgtatgagcgtttgtttgtccttgcgccgcttgcggaaatttgccagcaggttgaaaaagaggctacaagcgccgaaacagaccaagaaggtgtaagagtatggaagcagaaatctggggtagacgaattcgtgcattcagaaagctgaaaggttatactcaagaaggatttgcaaaagcattaggtatatcagtttctattctcggcgaaattgaacgcggaaaccgattgccgtctgctgccatcattcaagatgcagcagatgttttaaatataagtgcggacgaattggcgccgccagaaaaatagaacaaatgaaaggaggagaaaaattgttcaaaatcggagatattcaattgaaaaaccgggttgtgctcgcacctatggctggtgtctgcaactctgcgttcagattgactgtaaaggaattcggagccggattggtatgcgctgaaatggtcagtgacaaagcgatcctttacaacaatgcaagaacaatgggtatgctttatattgatgaacgtgagaaaccactgagccttcaaattttcggaggaaaaaaggaaacccttgtggaagcggcgaagtttgtagaccaaaacacaactgctgatatcattgatattaacatgggatgtcccgtgccgaagattacaaaatgcgatgcgggagccaaatggcttctcgatcctgataagatttacgaaatggtttctgcagtagtggatgctgttaataagccagttacagtgaaaatgagaatgggctgggatgaagaccacattttcgcagtgaaaaatgcacaggctgtagaacgtgcgggcggtaaagcagtggcgcttcacggccgtacgagagtgcagatgtacgaaggaacggcaaactgggatatcatcaaagaagtaaaacaatcagtatcgattccggttatcggaaacggcgatgttaagacaccgcaggatgctaagcgtatgctcgatgagacaggagtagacggggtcatgatcggacgcgctgcattgggtaacccgtggatgatttaccgtacggttcagtatcttgaaacaggtaaattaaaagaagagccgcaagtacgcgaaaaaatggccgtatgcaaactgcatcttgaccgcctgattgacttaaaaggtgaaaacgtagcggtaagagaaatgagaaagcacgctgcatggtatctgaaaggcgtgaaaggcaatgcgaacgttcgtaatgaaatcaatcattgcgagacgagagaagagtttgtacagcttttagatgcatttacggttgaagttgaggcaaaagagcttcaaaatgcaaaagtaggataatactcacctctatttgctgctcactgctagttttacgctggcagtttttctgcttttttcatgaaacaatatctgtaatggagtgataacaatgagtcaagaagagcataaccatgaagaattgaatgatcagctgcaagtcagacgcgataaaatgaatcagctgagagataacggcatcgatccattcggcgcacgttttgaaagaactcatcagtctcaagaagttatttcggcatatcaagatctaaccaaagaagagttagaagaaaaagcgattgaagttacaatcgcaggccgcatgatgacaaaacgcggcaaaggaaaagccggctttgcccatcttcaggatttagaaggccaaatccaaatctacgtaagaaaagacagtgtcggtgacgaccaatatgaaatcttcaagtcttctgacctcggtgatcttatcggcgtaaccggaaaagtcttcaaaacaaatgtaggcgaattgtctgttaaagcaacttcctttgaattgctgacaaaagcgcttcgtccgcttcctgacaaataccatggtttaaaagacgttgagcagcgctaccgtcagcgctatctggatcttatcgtaaacccagacagcaaacatacgttcattacacgaagcaagatcattcaagctatgagaaggtaccttgatgatcatggatacttagaagtagaaacacctacaatgcacagcattcctgggggagcttctgcacgtccgtttatcactcaccacaacgcgttagacattccactctatatgcgtattgctatcgaactgcacctaaaacgtctaattgtcggcggtttagaaaaagtatatgaaatcggccgtgttttccgtaacgaaggtgtctctacacgccataaccctgaatttacaatgattgagttatatgaagcatatgcggactataaagatatcatgagcttaactgaaaaccttgtcgctcatatcgcccaagaagtgcttggcacaactacgattcaatacggggaagagcaaatcgaccttaaaccggagtggaaaagaatccatatggttgacgcagtcaaagaagcgaccggcgttgatttctgggaagaggttactgttgagcaggcgcgtgaatatgcaaaagaacatgaagtagaaattaaagactctatgacagtaggccatatcatcaacgaattcttcgaacaaaaaattgaagaaacgcttattcagccaacgtttatttacgggcatcctgtagaaatttctcctcttgctaagaaaaaccctgaggacccgcgttttacagaccgttttgagctgtttatcgttggccgtgaacatgccaacgcgtttacagagctgaatgatcctattgatcaaagagaacgctttgaagcgcaattaaaagagcgtgaagccggtaatgatgaagctcatttaatggatgaagactttgttgaagctctggaatacggtatgccgccaacaggaggtttaggcatcggtatcgaccgtctggttatgctgctgacgaatgccccttctattcgcgatgtgctgttattcccgcaaatgagacaacgctaataaaaaagagcggtatcctccatagggaaaggatgccgctctttttaaatcccttagtatttcttcaaaaaaactattgcactattatttactaggtggtatattattattcgttgccgctaaacaaggcgataacgaaaaaaagaacttcaaaaaaagttattgacttcactgagtcaacgagttataataataaagtcgcttgaacgaagtgaacaaaatgatctttgaaaactaaacaagacaaaacgtacctgttaattcagtttttaaaaatcgcacagcgatgtgcgtagtcagtcaaactactttatcggagagtttgatcctggctcaggacgaacgctggcggcgtgcctaatacatgcaagtcgagcggacagatgggagcttgctccctgatgttagcggcggacgggtgagtaacacgtgggtaacctgcctgtaagactgggataactccgggaaaccggggctaataccggatggttgtttgaaccgcatggttcaaacataaaaggtggcttcggctaccacttgcagatggacccgcggcgcattagctagttggtgaggtaatggctcaccaaggcaacgatgcgtagccgacctgagagggtgatcggccacactgggactgagacacggcccagactcctacgggaggcagcagtagggaatcttccgcaatggacgaaagtctgacggagcaacgccgcgtgagtgatgaaggttttcggatcgtaaagctctgttgttagggaagaacaagtgccgttcgaatagggcggtaccttgacggtacctaaccagaaagccacggctaactacgtgccagcagccgcggtaatacgtaggtggcaagcgttgtccggaattattgggcgtaaagggctcgcaggcggtttcttaagtctgatgtgaaagcccccggctcaaccggggagggtcattggaaactggggaacttgagtgcagaagaggagagtggaattccacgtgtagcggtgaaatgcgtagagatgtggaggaacaccagtggcgaaggcgactctctggtctgtaactgacgctgaggagcgaaagcgtggggagcgaacaggattagataccctggtagtccacgccgtaaacgatgagtgctaagtgttagggggtttccgccccttagtgctgcagctaacgcattaagcactccgcctggggagtacggtcgcaagactgaaactcaaaggaattgacgggggcccgcacaagcggtggagcatgtggtttaattcgaagcaacgcgaagaaccttaccaggtcttgacatcctctgacaatcctagagataggacgtccccttcgggggcagagtgacaggtggtgcatggttgtcgtcagctcgtgtcgtgagatgttgggttaagtcccgcaacgagcgcaacccttgatcttagttgccagcattcagttgggcactctaaggtgactgccggtgacaaaccggaggaaggtggggatgacgtcaaatcatcatgccccttatgacctgggctacacacgtgctacaatggacagaacaaagggcagcgaaaccgcgaggttaagccaatcccacaaatctgttctcagttcggatcgcagtctgcaactcgactgcgtgaagctggaatcgctagtaatcgcggatcagcatgccgcggtgaatacgttcccgggccttgtacacaccgcccgtcacaccacgagagtttgtaacacccgaagtcggtgaggtaaccttttaggagccagccgccgaaggtgggacagatgattggggtgaagtcgtaacaaggtagccgtatcggaaggtgcggctggatcacctcctttctaaggatattttacggaatataagaccttgggtcttataaacagaacgttccctgtcttgtttagttttgaaggatcattccttcgaaacgtgttctttgaaaactagataacagtagacatcacattcaagtaatacaagatatcacatagtgattctttttaacggttaagttagaaagggcgcacggtggatgccttggcactaggagccgatgaaggacgggacgaacaccgatatgcttcggggagctgtaagcaagctttgatccggagatttccgaatggggaaacccaccactcgtaatggagtggtatccatatctgaattcataggatatgagaaggcagacccggggaactgaaacatctaagtacccggaggaagagaaagcaaatgcgattccctgagtagcggcgagcgaaacgggattagcccaaaccaagaggcttgcctcttggggttgtaggacactctgtacggagttacaaaggaacgaggtagatgaagaggtctggaaaggcccgccataggaggtaacagccctgtagtcaaaacttcgttctctcctgagtggatcctgagtacggcggaacacgtgaaattccgtcggaatccgggaggaccatctcccaaggctaaatactccctagtgaccgatagtgaaccagtaccgtgagggaaaggtgaaaagcaccccggaaggggagtgaaagagatcctgaaaccgtgtgcctacaagtagtcagagcccgttaacgggtgatggcgtgccttttgtagaatgaaccggcgagttacgatcccgtgcaaggttaagcagaagatgcggagccgcagcgaaagcgagtctgaatagggcgcatgagtacgtggtcgtagacccgaaaccaggtgatctacccatgtccagggtgaagttcaggtaacactgaatggaggcccgaacccacgcacgttgaaaagtgcggggatgaggtgtgggtaggggtgaaatgccaatcgaacctggagatagctggttctctccgaaatagctttagggctagcctcaaggtaagagtcttggaggtagagcactgattggactaggggcccctaccgggttaccgaattcagtcaaactccgaatgccaatgacttatccttgggagtcagactgcgagtgataagatccgtagtcgaaagggaaacagcccagaccgccagctaaggtcccaaagtatacgttaagtggaaaaggatgtggagttgcttagacaaccaggatgttggcttagaagcagccaccatttaaagagtgcgtaatagctcactggtcgagtgactctgcgccgaaaatgtaccggggctaaacgtatcaccgaagctgcggactgttcttcgaacagtggtaggagagcgttctaagggctgtgaagccagaccggaaggactggtggagcgcttagaagtgagaatgccggtatgagtagcgaaagaggggtgagaatcccctccaccgaatgcctaaggtttcctgaggaaggctcgtccgctcagggttagtcgggacctaagccgaggccgaaaggcgtaggcgatggacaacaggttgatattcctgtaccacctcctcaccatttgagcaatggggggacgcaggaggatagggtaagcgcggtattggatatccgcgtccaagcagttaggctgggaaataggcaaatccgtttcccataaggctgagctgtgatggcgagcgaaatatagtagcgaagttcctgattccacactgccaagaaaagcctctagcgaggtgagaggtgcccgtaccgcaaaccgacacaggtaggcgaggagagaatcctaaggtgatcgagagaactctcgttaaggaactcggcaaaatgaccccgtaacttcgggagaaggggtgctctgttagggtgcaagcccgagagagccgcagtgaataggcccaggcgactgtttagcaaaaacacaggtctctgcgaagccgtaaggcgaagtataggggctgacgcctgcccggtgctggaaggttaagaggagcgcttagcgtaagcgaaggtgcgaattgaagccccagtaaacggcggccgtaactataacggtcctaaggtagcgaaattccttgtcgggtaagttccgacccgcacgaaaggcgcaacgatctgggcactgtctcaacgagagactcggtgaaattatagtacctgtgaagatgcaggttacccgcgacaggacggaaagaccccgtggagctttactgcagcctgatattgaatgttggtacagcttgtacaggataggtaggagccttggaaaccggagcgccagcttcggtggaggcatcggtgggatactaccctggctgtattgaccttctaacccgccgcccttatcgggcggggagacagtgtcaggtgggcagtttgactggggcggtcgcctcctaaaaggtaacggaggcgcccaaaggttccctcagaatggttggaaatcattcgcagagtgtaaaggcacaagggagcttgactgcgagacctacaagtcgagcagggacgaaagtcgggcttagtgatccggtggttccgcatggaagggccatcgctcaacggataaaagctaccccggggataacaggcttatctcccccaagagtccacatcgacggggaggtttggcacctcgatgtcggctcatcgcatcctggggctgtagtcggtcccaagggttgggctgttcgcccattaaagcggtacgcgagctgggttcagaacgtcgtgagacagttcggtccctatccgtcgcgggcgcaggaaatttgagaggagctgtccttagtacgagaggaccgggatggacgcaccgctggtgtaccagttgttctgccaagggcatcgctgggtagctatgtgcggacgggataagtgctgaaagcatctaagcatgaagcccccctcaagatgagatttcccattccgcaaggaagtaagatccctgaaagatgatcaggttgataggtctgaggtggaagtgtggcgacacatggagctgacagatactaatcgatcgaggacttaaccatatttttgaatgatgtcacatctgttatctagttttgagagaacactctcaatttgtttggtggcgatagcgaagaggtcacacccgttcccataccgaacacggaagttaagctcttcagcgccgatggtagtcgggggtttccccctgtgagagtaggacgccgccaagcaattgcacgttagtgcaattatggaggattagctcagctgggagagcatctgccttacaagcagagggtcggcggttcgagcccgtcatcctccaccattatgccggtgtagctcaattggtagagcaactgacttgtaatcagtaggttgggggttcaagtcctcttgccggcaccacttttatatgatataatactcaagtctcttgtagaagagccattagctcagttggtagagcatctgacttttaatcagagggtcgaaggttcgagtccttcatggctcaccattttacgcgggtgtggcggaattggcagacgcgctagacttaggatctagtgtctttatgacgtgggggttcaagtcccttcacccgcattatataggataacagttagaaaaactggacatcctgtctgcggaagtagttcagtggtagaacaccaccttgccaaggtgggggtcgcgggttcgaatcccgtcttccgctccaactataccatccacgccggggtggtggaattggcagacacacaggacttaaaatcctgcggtaggtgactaccgtgccggttcaagtccggccctcggcattatgttttgcgcccgtagctcaattggatagagcgtttgactacggatcaaaaggttaggggttcgactcctctcgggcgcgccatatcttttaatagaatagataggaaatcgggaagtagctcagcttggtagagcacatggtttgggaccatggggtcgcaggttcgaatcctgtcttcccgaccatttttttatggggccttagctcagctgggagagcgcctgctttgcacgcaggaggtcagcggttcgatcccgctaggctccaccaaaagtttttaaaaaagttgttgactttgaagaagtgacgttgtatactaataaagttgctttaacaaagcggacaaacaaaatgatctttgaaaactaaacaagacaaaacgtacctgttaattcagtttttaaaaatcgcacagcgatgtgcgtagtcagtcaaactactttatcggagagtttgatcctggctcaggacgaacgctggcggcgtgcctaatacatgcaagtcgagcggacagatgggagcttgctccctgatgttagcggcggacgggtgagtaacacgtgggtaacctgcctgtaagactgggataactccgggaaaccggggctaataccggatggttgtttgaaccgcatggttcaaacataaaaggtggcttcggctaccacttacagatggacccgcggcgcattagctagttggtgaggtaacggctcaccaaggcaacgatgcgtagccgacctgagagggtgatcggccacactgggactgagacacggcccagactcctacgggaggcagcagtagggaatcttccgcaatggacgaaagtctgacggagcaacgccgcgtgagtgatgaaggttttcggatcgtaaagctctgttgttagggaagaacaagtaccgttcgaatagggcggtaccttgacggtacctaaccagaaagccacggctaactacgtgccagcagccgcggtaatacgtaggtggcaagcgttgtccggaattattgggcgtaaagggctcgcaggcggtttcttaagtctgatgtgaaagcccccggctcaaccggggagggtcattggaaactggggaacttgagtgcagaagaggagagtggaattccacgtgtagcggtgaaatgcgtagagatgtggaggaacaccagtggcgaaggcgactctctggtctgtaactgacgctgaggagcgaaagcgtggggagcgaacaggattagataccctggtagtccacgccgtaaacgatgagtgctaagtgttagggggtttccgccccttagtgctgcagctaacgcattaagcactccgcctggggagtacggtcgcaagactgaaactcaaaggaattgacgggggcccgcacaagcggtggagcatgtggtttaattcgaagcaacgcgaagaaccttaccaggtcttgacatcctctgacaatcctagagataggacgtccccttcgggggcagagtgacaggtggtgcatggttgtcgtcagctcgtgtcgtgagatgttgggttaagtcccgcaacgagcgcaacccttgatcttagttgccagcattcagttgggcactctaaggtgactgccggtgacaaaccggaggaaggtggggatgacgtcaaatcatcatgccccttatgacctgggctacacacgtgctacaatggacagaacaaagggcagcgaaaccgcgaggttaagccaatcccacaaatctgttctcagttcggatcgcagtctgcaactcgactgcgtgaagctggaatcgctagtaatcgcggatcagcatgccgcggtgaatacgttcccgggccttgtacacaccgcccgtcacaccacgagagtttgtaacacccgaagtcggtgaggtaaccttttaggagccagccgccgaaggtgggacagatgattggggtgaagtcgtaacaaggtagccgtatcggaaggtgcggctggatcacctcctttctaaggatattttacggaatataagaccttgggtcttataaacagaacgttccctgtcttgtttagttttgaaggatcattccttcgaaacgtgttctttgaaaactagataacagtagacatcacattcaagtaatacaagatatcacatagtgattctttttaacggttaagttagaaagggcgcacggtggatgccttggcactaggagccgatgaaggacgggacgaacaccgatatgcttcggggagctgtaagcaagctttgatccggagatttccgaatggggaaacccaccactcgtaatggagtggtatccatatctgaattcataggatatgagaaggcagacccggggaactgaaacatctaagtacccggaggaagagaaagcaaatgcgattccctgagtagcggcgagcgaaacgggatcagcccaaaccaagaggcttgcctcttggggttgtaggacactctgtacggagttacaaaggaacgaggtagatgaagaggtctggaaaggcccgccataggaggtaacagccctgtagtcaaaacttcgttctctcctgagtggatcctgagtacggcggaacacgtgaaattccgtcggaatccgggaggaccatctcccaaggctaaatactccctagtgaccgatagtgaaccagtaccgtgagggaaaggtgaaaagcaccccggaaggggagtgaaagagatcctgaaaccgtgtgcctacaagtagtcagagcccgttaacgggtgatggcgtgccttttgtagaatgaaccggcgagttacgatcccgtgcaaggttaagcagaagatgcggagccgcagcgaaagcgagtctgaatagggcgcatgagtacgtggtcgtagacccgaaaccaggtgatctacccatgtccagggtgaagttcaggtaacactgaatggaggcccgaacccacgcacgttgaaaagtgcggggatgaggtgtgggtaggggtgaaatgccaatcgaacctggagatagctggttctctccgaaatagctttagggctagcctcaaggtaagagtcttggaggtagagcactgattggactaggggcccctaccgggttaccgaattcagtcaaactccgaatgccaatgacttatccttgggagtcagactgcgagtgataagatccgtagtcgaaagggaaacagcccagaccgccagctaaggtcccaaagtatacgttaagtggaaaaggatgtggagttgcttagacaaccaggatgttggcttagaagcagccaccatttaaagagtgcgtaatagctcactggtcgagtgactctgcgccgaaaatgtaccggggctaaacgtatcaccgaagctgcggactgttcttcgaacagtggtaggagagcgttctaagggctgtgaagccagaccggaaggactggtggagcgcttagaagtgagaatgccggtatgagtagcgaaagaggggtgagaatcccctccaccgaatgcctaaggtttcctgaggaaggctcgtccgctcagggttagtcgggacctaagccgaggccgaaaggcgtaggcgatggacaacaggttgatattcctgtaccacctcctcaccatttgagcaatggggggacgcaggaggatagggtaagcgcggtattggatatccgcgtccaagcagttaggctgggaaataggcaaatccgtttcccataaggctgagctgtgatggcgagcgaaatatagtagcgaagttcctgattccacactgccaagaaaagcctctagcgaggtgagaggtgcccgtaccgcaaaccgacacaggtaggcgaggagagaatcctaaggtgatcgagagaactctcgttaaggaactcggcaaaatgaccccgtaacttcgggagaaggggtgctctgttagggtgcaagcccgagagagccgcagtgaataggcccaggcgactgtttagcaaaaacacaggtctctgcgaagccgtaaggcgaagtataggggctgacgcctgcccggtgctggaaggttaagaggagcgcttagcgtaagcgaaggtgcgaattgaagccccagtaaacggcggccgtaactataacggtcctaaggtagcgaaattccttgtcgggtaagttccgacccgcacgaaaggcgcaacgatctgggcactgtctcaacgagagactcggtgaaattatagtacctgtgaagatgcaggttacccgcgacaggacggaaagaccccgtggagctttactgcagcctgatattgaatgttggtacagcttgtacaggataggtaggagccttggaaaccggagcgccagctttggtggaggcatcggtgggatactaccctggctgtattgaccttctaacccgccgcccttatcgggcggggagacagtgtcaggtgggcagtttgactggggcggtcgcctcctaaaaggtaacggaggcgcccaaaggttccctcagaatggttggaaatcattcgcagagtgtaaaggcacaagggagcttgactgcgagacctacaagtcgagcagggacgaaagtcgggcttagtgatccggtggttccgcatggaagggccatcgctcaacggataaaagctaccccggggataacaggcttatctcccccaagagtccacatcgacggggaggtttggcacctcgatgtcggctcatcgcatcctggggctgtagtcggtcccaagggttgggctgttcgcccattaaagcggtacgcgagctgggttcagaacgtcgtgagacagttcggtccctatccgtcgcgggcgcaggaaatttgagaggagctgtccttagtacgagaggaccgggatggacgcaccgctggtgtaccagttgttctgccaagggcatcgctgggtagctatgtgcggacgggataagtgctgaaagcatctaagcatgaagcccccctcaagatgagatttcccattccgcaaggaagtaagatccctgaaagatgatcaggttgataggtctgaggtggaagtgtggcgacacatggagctgacagatactaatcgatcgaggacttaaccatatttttgaatgatgtcacatctgttatctagttttgagagaacactctcaatttgtttggtggcgatagcgaagaggtcacacccgttcccataccgaacacggaagttaagctcttcagcgccgatggtagtcgggggtttccccctgtgagagtaggacgccgccaagcaagcttaaacccagctcaatgagctgggttttttgtattttggtttattggtatcataaaattccacttaactgtataatataataactttataccgaattttaaatcagcaatcaggttttgtggaccgggaaaatggaaataatgaaggatagagcgagaaagttgaaaattctcgagaaacggcttatagtaagattaaagtcaaatatagtcaaagtcagtaaaggagggggttgagtgggacataatatttctgacatcattgaacaatatttaaaacgagtgttagatcaaaatggcaaggaaattttagagattaaacgaagtgaaattgcagataaatttcaatgcgttccttcccaaataaattatgtcatcaacaccagatttacaagcgaaagaggatatattgttgagagcaaacgcgggggcggcggttacatcagaatcattaaaattaaaatgaacaatgaagttgtcctgatcaataatataatttctcaaattaatacccatttgtctcaagcagcctctgatgacattattttaaggctattagaagacaaggtaatttcagaaagagaagcaaaaatgatggtcagcgtaatggaccgctcagttttacacattgacttacctgaacgtgatgaattaagagcgagaatgatgaaggcaatgctgacttctttaaaattaaaataagcgggtgaaaagattgatttgtcaagagtgccacgagagaccagccacttttcactttacaaaggttgttaacggagaaaaaatagaagttcatatttgtgaacaatgtgccaaagaaaatagtgattcatatggtataagtgcaaatcagggtttctctattcataatttactttcgggtttactgaacatggattcttcatttcaaaatgcaggaactcaaatgttcagtcactcggagcaaatatctgcttgtccgaaatgcggaatgacttttcagcaattcagaaaaattggccgttttggatgttctgaatgttacaaaacatttcatagcaacattacaccaatcctacgtaaagtgcacagcggaaacactgtgcatgcaggtaagataccgaaacgaataggcggcaatcttcatgtcagacggcagattgatatgctaaaaaaggaattagaatccttaatccatcaagaagaatttgaaaatgcagctcatgtaagagatcaaattcgtttattagaacaatcactcaaaagtacagatagtgaggaggaacaggagtaatgtcgctaaagcattttattcaggacgcactaagcagttggatgaagcagaaaggacctgaaagtgacattgtactcagcagccgcatacgtttagcaagaaactttgagcatattcggttccctacgcggtattccaatgaagaagcctcatccatcatacagcaatttgaagatcagttttcagagcaagaaattcccggaatcggcaaatttgttttgattagaatgaatgatgcacagcctttagaaaagcgtgtacttgttgaaaaacatctaatcagcccgaatttgacagagtctccttttggcggctgtttgctttctgaaaatgaggaagtaagcgtcatgctaaatgaagaggaccatattagaattcagtgtcttttccctggatttcagcttttagaagcaatgaaagccgcaaaccaggtcgacgactggattgaagaaaaagttgattatgcattcaatgagcaaagaggatacttaaccagctgtcctacaaacgtaggtactggtttaagggcttcggtcatgatgcatctgccggcgctggttttaactaggcaaataaatcgaattataccggcaattaatcaattaggcttagttgttagaggaatttatggggaaggcagcgaagcagtagggaatatctttcaaatttcaaatcagatcacgcttggtaagtcagagcaggatattgtagaggatcttaacagtgttgctgctcagttgattgaacaagaacgatctgcccgagaagcgatttatcaaacttctaaaatcgaacttgaggatcgggtatatcggtcatatggggtcttgtctaattgccggatgatagaatcgaaagaaactgcaaagtgcctttcagatgttcggttaggcatagacttaggcataataaaaggactttcaagcaacatacttaacgaacttatgattttgacgcagccagggtttttacagcaatactcgggaggcgctttgcgaccgaacgaaagggacattcgaagagcggctctcatcagagaacggcttcacttagaaatgaatgggaaaagacaggaggatgaatcgatatgatgtttggaagatttacagaacgagctcaaaaagtactggcgctagcacaggaagaagcacttcggttaggtcataataacattggcactgagcatattttattaggactggtaagagaaggagagggcattgctgctaaagctcttcaagcgcttggactcggttcagaaaaaattcagaaagaagtagaaagtttgatcgggcgcgggcaggaaatgtctcaaacgattcattatactcctagagctaaaaaagtcattgagctttcaatggatgaggcaagaaaactcggtcattcttatgtgggaacagaacatattcttcttggtctgattcgtgaaggagaaggtgttgctgcgagagttctgaataatctcggtgtcagcttaaataaagcaagacagcaggtgctccagcttctaggaagtaatgaaacaggatcatcagcggcaggaacaaacagcaatgcgaatacgcctacgcttgacagcttggcaagagacttaactgctattgcgaaggaagacagccttgaccctgtaatcggcagaagcaaggagatccagcgtgtcattgaagtgttaagccgcagaacgaaaaacaaccctgttctcattggggaaccaggtgtaggtaaaacggctatcgcagaaggtttggcacagcaaattatcaataatgaagtacccgaaattttgcgtgataaacgtgtgatgacattagacatgggaacagttgttgccggcacaaaataccgcggagaatttgaggatcgcctgaagaaggtcatggatgaaattcgccaggcaggaaatatcattctattcatcgatgagctccatacattaatcggggcaggcggagcagaaggtgctattgatgcatctaatattttaaaaccttcacttgctcgtggcgaactccaatgtattggtgcaacgactcttgatgagtaccgtaaatatattgaaaaagatgcagcactggaacgccgttttcagccgattcaggttgatcagccatctgtagatgaaagtattcaaattttacaaggtctgcgtgacagatacgaagcccaccaccgcgtttctatcactgatgatgccattgaagctgcggttaagctttctgacagatatatttctgaccgcttccttccggataaagcaattgacttgatcgatgaagcgggttcaaaggtgagactgcgctcatttacaacgcctcctaacttaaaagagcttgagcagaagcttgatgaggttcgtaaagagaaggatgcggcagtgcaaagccaagagtttgaaaaagctgcttccttgcgtgatactgaacaacgcctgcgcgagcaagtagaggatacgaagaaatcatggaaagagaagcaagggcaggaaaactcagaggttactgtggatgatattgcgatggttgtatccagctggaccggtgtgcctgtatctaaaatcgcccaaactgaaactgataagcttctcaatatggaaaacattcttcactcccgtgtcatcggccaggatgaagcagttgtagcggttgcaaaagccgtcagacgtgcaagagcaggattgaaagatcctaaacgcccaatcggctcattcattttcttaggccctacaggtgtaggtaaaacagaacttgcacgagcacttgctgaatccatttttggcgatgaagaatccatgatcagaattgatatgtctgaatacatggaaaaacattcaacttcaagacttgttggttcacctccgggttatgtgggatatgatgaaggcggtcaattgacagagaaagtcagaagaaaaccttactctgtcgtgcttcttgatgagatcgagaaagcgcaccctgatgtcttcaatatccttctgcaagttcttgaagacggacgattgactgattctaaaggacgcacagtcgatttccgcaataccattctgatcatgacatcaaacgtcggagcaagtgagctaaaacgcaataaatatgtcggctttaacgttcaggatgaaactcaaaatcataaagacatgaaagataaagtgatgggtgaattaaaacgagcgttcagacctgagttcatcaaccgtattgatgaaatcattgtcttccattcacttgagaaaaaacatctcactgagattgtgtcattaatgtctgatcaattaacgaaacgcctgaaagaacaagatctttctatcgaattgacagatgctgcaaaagcgaaagtcgcggaagagggcgttgacctggaatacggtgcccgtccgttaagaagagcgatccaaaaacatgtcgaggatcgtttatctgaagaactcctcagaggaaatattcataaaggacagcatattgttcttgatgtagaagatggcgaatttgtcgtaaaaacgactgctaaaacgaattaatatagaagacggaaatgaggcatacagcatgtaagtgtatgcctcactttcatatcaagaaatagaacaagggagaggtcttacactatatatggctaaaacaaaatcgaagttcatctgccaatcctgcggctacgagtctccaaaatggatggggaaatgtccgggctgtggtgcttggaatacaatggtggaagaaatgattaaaaaagcaccggccaatcggagagcggctttttctcattctgttcaaactgtacagaaaccttcacctattacatcaatcgaaacatcagaagaaccccgcgtcaaaacccagcttggcgagtttaacagagtactcggcggaggtgtcgttaaaggctccctcgttttaattggcggtgatcctggtatcggaaagtcaacgctattactgcaggtttccgctcaattatcaggctcatcaaacagtgtcctgtatatttcgggagaagaatctgtaaagcaaacgaagctgcgagcagaccgtctcggcattaataatccgtcactgcatgttttatctgaaaccgatatggagtatatttcgtctgctatacaagagatgaatccatcgtttgtcgttgttgactctattcaaacggtttaccaaagcgatattacatctgctccaggcagtgtgtcacaggtcagagaatgtaccgctgagctgatgaaaattgcaaaaacaaaaggtattccgatttttatcgtagggcacgtgacgaaagaagggtctattgcaggtccgagactgttggagcatatggttgacactgttttatattttgaaggagaacgccaccatactttccgtattttgcgggctgtaaaaaaccgtttcggatctacaaacgaaatgggcattttcgaaatgcgggaagaggggctcactgaggttttgaatccttcggaaattttcttagaagaacgctctgctggttccgcaggctcgagtatcactgcctctatggagggcactagaccgattctcgttgaaattcaggcactcatctcgccaacaagttttggcaacccaaggcgtatggcaacgggaatagaccataacagggtttctctgttaatggctgtgttagaaaaaagagttggactgctgctgcaaaatcaggatgcttatttgaaagtggctggcggcgttaagcttgatgaaccggcaattgatcttgcgattgtgattagtattgcatcaagctttagagacacacctccaaatcctgcagattgttttattggagaagtgggattaaccggagaagtccggcgggtttcaagaattgaacagcgtgtgaaagaagcggcaaagcttggttttaaacgcatgatcatacccgcggcaaatctggatggatggacaaaaccaaaagggattgaggttatcggagtagcaaatgttgcagaagcgcttcgtacttcattaggaggataatagatggaaaaagagaaaaaaggggcgaaacacgagttagacctgtcatctatattgcagtttgttgctccgggtacaccgctcagagcggggatggaaaacgtcttgagagcaaatacaggcggtctgattgttgttggatataatgataaagtaaaagaagtggtggacggcggctttcacataaacacggctttttctccggcgcatttatatgagctggctaaaatggatggagcgatcattttaagtgattctggtcaaaagatcctatacgcgaatactcagctgatgccggatgccacaatttcttcatcagaaacaggaatgcggcacagaactgccgaaagagtagctaagcaaactggctgtcttgtaatcgccatttctgaaagaagaaatgtcataacgttatatcaggaaaacatgaagtatacactaaaagacataggatttattttaaccaaggcgaaccaagccattcaaacacttgaaaaatataagacaatcctcgataaaacgattaatgcactgaacgcgttagagtttgaggaacttgttaccttcagtgatgtcttgtctgtcatgcatcgttatgaaatggtactgagaatcaaaaacgaaattaatatgtatatcaaagagctggggacagaagggcatctgatcaaactgcaagtcattgaattgattacggatatggaagaagaggccgctttatttattaaggactatgtaaaagaaaagattaaagatccgtttgttctcttgaaggagctgcaggatatgtccagttatgatctgctggatgattccattgtgtataagcttctcggttaccctgcttctactaatcttgatgattatgtattgccgagaggatacaggctgttaaataagataccgcgtcttccgatgccgattgttgaaaatgttgtagaagcatttggagtcctgccaaggattattgaggcgagtgcagaagaattagatgaagtagagggaatcggtgaagtacgagcccaaaaaatcaaaaaaggattaaaacgcctgcaagagaagcattatttagacagacaactgtgatttcggttaaaaccttatgaatacgggtatattaatgttggtttttgtttattctgatattcgtaggatgcataagactttgtgaaattaaaatgttaaaaaaggaggtgggggtatgttaaaacgaatagttcaggcgttcttcattatttttggcggcgttgttggtatatttttgatacctgaattgtttgtactgttaaatatacaggacatacctttaataacaaacgcatatacgtctgcggcaataggagcaattatcttttttctcatcagtatatggggtacagaatacgttgtgaactgggtgaagtggatagaggattcattgttaaaagcgccggttccagatttgttatttggaagtcttggcttagtttttggacttataattgcttatcttatcgtaaatgttattcctttagacaatataccttaccgcatattcagcacaataattcctgtatttttggctttcttcctcggttatctcggcttccaggtgggctttaagaaaaaggatgaattgatcagcctgttttccatttccgccagaatgcaaaagaaaaaaggaacagctgatgaagaacatgaggttcaagacaagaagctgaaaattttggacactagtgttattattgatgggagaatagcagatatttgtcagactggttttttagagggagttatcgtgattccgcagtttgtccttgaggaattgcagcatattgcagactcttcagatgttttaaaacgaaacagaggacgccgcggtcttgatatcctgaaccgcattcagaaagaattagacattgaagttgaaatttacgaaggcgactttgaagatattcaggaggttgacagcaagctcgtcaaacttgctaagctgacatccggggtcgttgtgacgaatgattttaatttaaataaagtgtgcgagcttcagaaggtagcagtattaaacattaatgaccttgccaatgcggttaagcctgttgtgcttcctggcgaggaaatgaatgttcaggtcattaaggacgggaaagagcataatcagggagttgcctacttggatgacggtacgatgattgtcgttgaagaaggacggaattatatcggcaagcatattgatgtactcgtcacaagtgtgctgcagacagcagcgggacgaatgatttttgcgaagcctaagctgttggagaaggcgctgtaaagggagaagaaacaatgagttatgatgtggtgattcctgcagccggacagggaaagcggatgaaggcagggagaaataaactgttcattgagctgaagggagacccggtgatcatacacacgttaagagtgtttgacagccaccggcagtgcgataaaatcattttggtgattaacgagcaggagcgggagcactttcagcaattgctgtccgattacccgtttcaaacttcaattgagcttgttgcaggcggagatgagcgacagcacagtgtgtataaggggctgaaagccgtaaagcaggaaaagattgtccttgtacatgacggtgcccgtccatttataaaacatgaacaaattgacgaactgatcgcagaggcggaacagacaggagcggccatccttgctgttccggtaaaagatacgattaaacgcgttcaagatttacaagtcagtgagacgattgaacgttcaagcttgtgggctgtccaaacgccacaagcttttcgtctttctttattgatgaaggctcacgctgaggccgagcgcaagggatttttagggacggatgacgccagcctcgttgaacagatggagggcggttcggtccgtgttgtagaaggcagctatacaaatattaagctgacgacgccagacgatttgacgtcagctgaagctatcatggaatcagaaagtgggaataaacatgtttagaattggacaaggatttgatgtgcatcaattagtggagggccgtcctctcattattggcggaattgaaatcccgtacgaaaaagggctgcttggccattctgatgcagacgtattgttgcataccgtcgctgacgcctgcctgggagctgtgggtgaaggagacataggcaagcattttcctgacacagatcccgagttcaaggacgcagattctttcaaattacttcagcatgtctggggaatcgtgaaacagaaggggtatgtccttgggaacattgattgcaccatcatagcgcaaaagccgaagatgctgccgtacatagaagatatgagaaaaagaattgctgaaggccttgaggcagatgtttctcaagtaaatgtaaaagcaacaacgacagaaaagcttggatttacaggccgggcggaaggaatagcggctcaggcgacagtactgatacaaaaaggctaacttgttttgatgccgggtctatttggtggtagaatagattcatacatttttgcctgaggccatacatgacatgaaaggaagtatttgaaaatgggaaacgaagtacgcgtccgttatgcaccgagtccaaccggacatttgcatattggaaatgccagaacggcgctttttaattatttatttgcccgcaatcaaggcggtaagtttatcattcgagttgaggatactgataaaaagcgcaatattgagggcggagaacaaagccagctgaattatctgaagtggctaggtattgactgggatgagagtgtggatgtcggaggagagtacggtccataccgtcagtcagagcgtaacgatatctataaagtgtactatgaagagcttcttgaaaaagggcttgcttataaatgttactgtacggaagaagagcttgaaaaagagcgtgaagaacagattgcccgcggagaaatgcctcgttattccggaaaacacagagacctgactcaggaagaacaggagaaatttatcgccgaaggcagaaaaccaagtattcgtttccgtgtgccggaaggaaaagtcatcgccttcaacgacatcgtaaaaggcgaaatttcttttgaatcagatggcatcggcgacttcgttattgtgaaaaaggacggaacgcctacttataacttcgcggtagctattgatgactacttaatgaaaatgacacacgtgctgcgcggtgaggatcatatttctaacacaccgaaacagattatgatctatcaagcattcgggtgggatattcctcagttcggacacatgacgctgattgtaaacgaaagccgtaaaaagctcagcaaacgtgatgaatccattattcaattcatcgagcagtacaaagagcttggctacctgccagaagcgctgttcaactttatcggcttgttaggctggtcaccggttggagaagaagagcttttcacaaaagagcagtttattgaaatttttgatgtaaatcgtttatctaaatcaccagctttgtttgatatgcataagctaaaatgggttaacaaccaatatgtgaagaagctggatcttgatcaggttgttgaactgacgcttccgcatttgcaaaaagccggcaaagttggcactgagctttctgctgaagaacaagaatgggttcgtaaactgatttccctgtatcatgagcaattaagctacggtgcggaaattgttgagctgactgatttgttctttacggatgagatcgagtataatcaagaagcgaaagctgttctggaagaagaacaggttcctgaagtgctcagcacattcgcagcgaagcttgaagagcttgaggagttcactccggataatatcaaagcatcgatcaaagcagtgcagaaagaaactggccataaagggaaaaaactgtttatgccgattcgtgttgctgtaacagggcaaactcacggtccggaactgccgcaatcaattgaattgatcggtaaagagactgcaattcagcgtttaaagaatatctaaataaatgattgttgacagggaagagtataaagctttaggccattacagaaaggatcttcattggctgagagagatccatgagccgggttttagaagtgcgcccttaagacctttgaagaacgttttttgaaatcagtattcaaaggcggccgccgccgttacaggctgaagttgggagagcagaagtctgcttttcaaacagagtggaaccgcgcggttaaagcgtctctgtcatgtttacatgcagagacgctttttttattgggtagaggaaatcagatagagaaacggggggaagcatgtgttttttagaatgctcaaagaagacattgatactgtgttcgatcaagatcccgcagcaagaagctattttgaagtgattttaacttattccggtttacatgctatatgggcgcatcggattgcacatgctttatataaacgaaaattttatttccttgcacgccttatatctcaagtaagccgattttttaccgggatagaaatccaccccggcgctacaatcgggagaagatttttcatagaccacggcatgggggttgtcattggggagacatgtgaaatcggcaataacgtaaccgtttttcagggggttaccctcggggaacgggaaaagaaaagggaaaaaggcacccaacgattaaagatgacgcattgatagccacaggtgctaaagtgctcggttctattacggtcggtgaaggctcaaagattggcgctggttcagtagtgctgcatgatgttcctgatttttcaacagttgtcggtatccctggacgggtcgttgtacaaaatggcaagaaagtaagacgcgatttaaaccatcaggatttgcccgatccagttgctgaccgctttaagtctttggaacagcagattttagagctgaaggcagaacttgaagacagaaaagaaaggatcaatcaaaaatgacaatcacactttataatacattgactagacagaaggaaacattcgttcctcttgaagagggaaaagtgaaaatgtatgtatgcggacccacggtttacaattacattcatatcgggaacgcgcgtccggcaatcgtttacgatacggttcgaaactatttagagtataaaggctatgatgtgcagtatgtctctaacttcacagacgtagacgataaattaattaaagcggcaaatgaactcggtgaggatgtacccaccatttcagagcgttttattaaagcatactttgaagacgtaggtgcgctcggctgccgaaaagccgaccttcatccgcgagtaatggagaacatggatgccattatcgaattcgtagatcagctcgtgaaaaagggctacgcatatgaatcagaaggtgacgtatatttcaaaaccagagcatttgaagggtacggaaagctttctcagcaatcaatcgatgaactaagatcaggtgcacgcatccgggtcggcgagaaaaaagaagatgctcttgatttcgcactgtggaaagcggcaaaagaaggagaaatctcttgggatagcccttgggggaaagggcgtccgggctggcacattgaatgctcagcaatggtgaaaaagtatctcggtgaccagattgatatccatgcgggcggacaggatttaacattccctcaccatgaaaacgaaattgcgcaatctgaggcgctgacaggcaaaacgtttgcgaagtactggcttcataatggttatatcaatattgataatgaaaaaatgtcaaaatcactaggcaactttgtgcttgtgcatgacatcattaaacagcatgatccgcagcttttgagattctttatgctatctgttcattatcgccatccgattaactattcagaagagcttctggagaatacgaaaagcgcgttcagccgtttaaaaacagcgtacagcaatcttcagcaccgtctgaacagcagtacgaatttaaccgaagatgacgatcaatggcttgaaaaggttgaagaacaccgcaaagcattcgaagaagagatggacgatgattttaatacggcgaatgccatttcagtcttgtttgacttagcgaaacacgccaattattatcttcagaaagatcatacggctgatcatgtgattacggcgtttattgagatgtttgaccgcattgtttctgtcctcggtttttcgttgggtgagcaggaacttctcgatcaagagattgaagacttaatcgaaaagcgaaatgaagcgcgccggaatcgcgattttgcattgtcagaccagatccgcgaccagctgaaaagcatgaatatcattcttgaagatacggctcaaggcactcgctggaaacggggagaataacagatgcttgaatttgatacgataaaagattctaagcagcttaacggtcttgcgcttgcttatataggtgatgccatttttgaagtgtatgtcaggcatcacctgcttaagcagggctttaccaaaccaaatgatcttcataagaaatcaagccggattgtttcagcaaagtcacaggctgagatcctattttttctgcagaatcaatcattttttacggaagaagaggaagcggtgctgaaaagaggcagaaatgccaagtcagggacaacacctaaaaatacagatgttcagacgtaccgctacagtacagcatttgaagcgcttctgggctacctttttctagagaaaaaagaggaacgacttagtcagctcgtagccgaagctatacaattcgggacgtcagggaggaaaacaaatgagtcagcaacatgattacgtcatagggaaaaatgcagtgatcgagacgttaaaatctgatcggaagctgtataagctgtggatggcggaaaacaccgtaaagggacaagcacagcaagtgattgagcttgccaaaaagcagggaatcacgattcaatacgtcccgagaaaaaaactcgatcaaatggtgacaggacagcatcagggcgtagtggcacaggttgcagcgtatgaatatgcagaactggacgatttatataaagcagccgaagaaaaaaatgaacagcctttcttcctcattctggacgagcttgaagaccctcataatcttggttccattatgaggacagcagatgcggtcggcgctcatggcatcgtcattccaaaacggagagctgtcgggctgacaacaacagtggcaaaagcttcaacaggagcaattgagcacattcctgtagcaagagtcaccaatttggcacggacgttagaagagatgaaagagcggggaatctgggttgtcggaacggatgcgtccgcgcgtgaggatttccgtaatatggacggcaatatgcctttggctctagtcatcggaagtgaaggaaaagggatgggccgccttgtgaaggaaaagtgcgattttctcattaaactcccgatggccggaaaggtaacttcactaaatgcatctgtcgcggctggtcttttgatgtatgaagtctaccggaaacgaaaccctgtgggagaataaagacccatggatatcctgttagtagacgggtacaacatgattggagcctggccgcagctgaaggatttaaaagcgaacagttttgaagaggcgagagacgtactgattcagaaaatggcggaatatcaatcgtatacaggaaacagggttattgttgtttttgacgcgcatctcgtaaaagggcttgagaaaaaacagaccaaccatagagttgaagtaatttttacaaaagaaaatgagacggctgatgagcggatagaaaagctcgctcaggctttgaataatattgcgactcaaattcacgttgcgacctctgactatactgagcagtgggcgattttcggacagggggcattgcggaaatcggcccgggagcttctgagagaggtagaaacgattgaaaggcgaatagagagacgggtaagaaaaatcacttccgaaaagccggcgggtaaaattgctttatcggaagaggttttgaaaacgtttgaaaagtggaggcggggagacttagattaagttgacgcttttttgcccaatactgtataatatttctatctacgtgcgccggggggatcggagtgaatctacagaacaacaagggaaaattcaacaaagagcagttttgccagttggaggacgagcaggtcattgaaaaggttcatgttggggacagtgatgcgttagattacttgattacgaagtaccgaaactttgttcgggcaaaagcaagatcctatttcttaataggggcggacagagaggatattgttcaggaaggcatgataggcctctataagtctattcgtgacttcaaagaggacaagcttacctcattcaaagcttttgcagaattatgtattacccgccaaattattaccgcaataaagacagctactcgccagaaacacattcctttgaattcctacgtctcattagataaaccgatctttgatgaagaatcagaccgaacgctgctggatgtcatttcaggagcgaaaaccttaaatcctgaggaaatgatcattaatcaggaagaatttgatgatattgaaatgaaaatgggagaactattaagtgatttagagagaaaagtactcgtcttatatctcgacgggagaagttaccaagagatttctgatgaactgaaccgacatgtgaaatcgatcgacaatgcccttcagcgtgtgaaacgcaagctggagaagtacttggaaattcgcgaaatcagtttgtaataggaatttatgctatattgacagtatttttctgactatgatatgttactaaagataagaactaatgtctatttagaaaaaggtgtaatgacatgagaaaaaagattacgttagcatgcaagacatgcggaaaccgtaattatacgacaatgaagagctctgcatcagcggctgagcgattagaagtaaagaaatactgcagtacttgcaattcacatacagctcatcttgaaacaaaatagtttttgcgcttttaaattgtggaggtcttttacatgcgtattatgaaattctttaaagatgttgggaaagaaatgaaaaaggtaagctggcctaaaggaaaagagttaacgcgttataccattacggtaatttcaacagttatcttttttgttatcttttttgccctccttgacacaggaatttctcaattaattcgtttaatagttgaataatgatcagcaatacgtgctataatagatcataatattacttgccaaaacccgttcagcgggttttttattgtggcttaaaatgaaagttatcataggcttgccgcctattttttgaagcgttatggtaattcactaaaaccaaatgcggggagggaaggactggacagtcctgaatagaatggaaaagaattggtatgttgttcacacgtactctggttatgagaataaagtaaaagccaacttggaaaagcgtgttgaatcaatggggatgcaggataaaattttccgtgtagtcgtacccgaagaagaagaaacggatatcaaaaacggcaagaaaaaagtcgtgaaaaagaaagtattccctggttatgtgcttgttgaaattgtaatgacagacgactcttggtatgtcgtccgcaacacgccgggcgttactggattcgtaggatctgccgggtcaggttcaaaaccgacgccgcttcttccgggggaagcagaaaccattctgaagagaatgggcatggatgaacgaaaaactgatattgactttgaactgaaagagacagtgaaagtaatagacggaccttttgctaactttacaggatcaattgaagagattgattatgataaaagcaaggtcaaagttttcgttaatatgtttggccgtgaaacgccggttgagctggaatttacccaaatcgataaattgtaatgtgaaaaaacttgaaattgctatatataaatgataatatagcaaaggtacgtcttggacttatccaaggcaactagcatgatatttcgtcattcatataaagaatgaaaccttgagtgggagggtttaccctattaccacatcacggacttaaggaggtgtgtctcgtggctaaaaaagtagttaaagttgtaaaattgcaaattcctgctggaaaagctaacccagcaccaccagttggacctgcacttggtcaagccggtgttaacatcatgggattctgtaaggagtttaacgctcgtacagctgaccaagctggtttaatcattcctgttgaaatttcggtttacgaagaccgttcatttacatttattacaaaaactccacctgctgcagtattgcttaaaaaagcagctggaattgagtctggttctggtgaaccaaaccgtaataaagtggcaaccgttaagcgcgataaagtacgcgaaatcgctgaaacgaaaatgcctgacttaaacgcagcagacgttgaagcggcaatgcgcatggttgaaggtactgcccgcagtatgggtattgtaatcgaggattaatttgtttcttgtcgggttgcgagttttaacaagttcgcaacccttattcgtgggaggttattccgctataaccacataaggaggaaattttaaaatggctaaaaaaggtaaaaagtacgttgaagctgctaagcttgtagaccgttctaaagcttacgacgtctctgaagcagtagctctcgttaaaaaaacaaacacagctaaattcgacgctacagttgaagtggctttccgtttaggggttgaccctcgtaaaaacgaccagcaaatccgtggagcagttgtgcttccaaacggaactggtaaaactcagcgcgttctcgttttcgcaaaaggcgaaaaagcgaaagaagctgaagctgctggtgcagatttcgtaggcgatactgactacatcaacaaaattcaacaaggctggttcgatttcgatgttatcgtagctacacctgacatgatgggtgaagttggtaaaatcggtcgtgtacttggaccaaaaggtttaatgccgaaccctaaaactggtacagttactttcgaagttgaaaaagctatcggcgaaatcaaagctggtaaagttgaataccgcgttgataaagctggaaacattcatgttcctatcggtaaagtttctttcgaggatgaaaaacttgttgagaacttcacaacaatgtacgatacaatccttaaagctaaacctgctgcagctaaaggcgtttacgtgaaaaacgttgctgtaacttctactatgggacctggtgtcaaagtagactcttcaacttttaacgtaaaataatattgacatgacatcaacattctgatattattcaaaatgttgtaaaatagaatatcatttataccgtagacagtaggggcctaaccgcttaattatcctaccgaggtgtatattatcacagctattacgttacgtatgcttgtatatacagcctccatgtctcatggaggctttttatatggaatccgtcgtctcagtcgtgatcacctaacggtataagtgttacacaagaatctacaggaggtgtaaccatgagcagcgcaattgaaacaaaaaaagttgttgttgaagaaattgcttctaaactgaaagaaagtaaatcaacgatcatcgttgactatcgcggacttaacgtttctgaagtaactgaacttcgtaaacagcttcgcgaagctaacgttgagttcaaagtttacaaaaatacgatgactcgccgtgcggttgaacaagctgagcttaatggtttgaatgatttcttaactggaccgaacgcgatcgcattcagcactgaagatgttgtcgctccggctaaagttcttaatgacttcgctaaaaatcacgaagctcttgaaatcaaagctggcgttatcgaaggtaaagtttctactgttgaagaagtgaaagctcttgctgaacttccatcacgcgaaggcttgctttctatgttgcttagcgtacttcaagctccagttcgcaaccttgctcttgctgcaaaagctgtggcagaacaaaaggaagaacaaggcgcttaatctaatcagtttttcataaattaaaacaaaatggaggaattacaaatggctttaaatatcgaagaaatcattgcttccgttaaagaagcaactgtacttgaattgaacgacctagtaaaagcaatcgaagaagaatttggcgtaactgctgctgctcctgtagctgtagctggcggagctgctgctggcggagctgctgaagagcaaagcgaattcgatcttatccttgctggtgcaggatctcaaaaaatcaaagttatcaaagttgtacgtgaaatcactggtcttggcttgaaagaagctaaagagcttgttgacaacactccaaaaccacttaaagaaggtattgctaaagaagaagctgaagagcttaaagctaaacttgaagaagttggcgcttctgtagaagttaagtaatcttcacttacctgtaggggaagctcgcttttatgaggcgagctttttctttgccattctttaagccatgaaaaaaggaggttctaataatgagtgagcactattattcagaaaaaccttcagtaaaaagcaacaagcaaacctggtcttttaggcttcggaataaagatttcacgtttaccagcgacagcggggttttttctaaaaaagaagttgatttcggctcccgcctgctgattgattcttttgaagagcctgaggttgagggcggcattttagatgtaggctgcggatacggcccgattggtttatcgctcgccagcgactttaaagaccggaccatccacatgattgacgttaatgagagagccgtagaactatcaaatgaaaatgcggaacagaacggaataacaaacgttaagatttatcaaagcgatttgttttcaaacgttgattctgctcaaacatttgcttctattcttacaaatcccccaatccgagccggaaaaaaagttgtccatgctatctttgagaaaagcgctgaacacttaaaagcttcaggtgaattgtggatcgtcatacagaaaaagcaaggcgcgccttctgccattgaaaagctcgaggaactgttcgatgaagtttccgtcgttcaaaaaaagaaaggctattatatcataaaagcaaaaaaagtttgactcggtattttaactatgttaatattgtaaaatgccaatgtatatattttgcttgatatgatgaattgtcaatatctatgtataaattatacaagtatggaaatgctaataaaatcggtatttgtttttggatgtggttttcttaattagaaacccttttttcttttgtcttgtaaaagtattttctttctttggaagaaatgcttattacacatataatacgcatgatttgaggggtgaatcagttgacaggtcaactagttcagtatggacgacaccgccagcgcagaagctatgctcgcattagcgaagtgttagaattaccaaatctcattgaaattcaaacctcttcttatcagtggtttcttgatgagggtcttagagagatgtttcaagacatatcaccaattgaggatttcactggtaacctctctcttgagttcattgattatagtttaggtgagcctaaatatcctgtagaggaatcaaaagaacgtgatgtgacttactcagctccgctaagagtgaaggttcgtttaattaacaaagaaactggagaggtaaaagaccaagatgtcttcatgggtgatttccctattatgacagatacaggtacttttatcattaacggtgcggaacgtgttatcgtttcccagcttgttcggtctccaagtgtatatttcagtggtaaagtagacaaaaacggtaaaaaaggttttaccgcaactgtcattccaaaccgtggcgcatggttagaatacgaaactgatgcgaaagatgttgtttatgtccgcattgatcgcacacgtaagttgccggttacggttcttttgcgtgctctcggcttcggctccgatcaagagattcttgatctcataggagaaaacgaatacctgcgaaatacgcttgataaagataacacagaaaacagcgacaaagcgttgctggaaatttacgagcgtctccgtcctggagagccgcctacagtagaaaatgcgaaaagcttgcttgattctcgtttctttgatccgaaacgatacgatcttgccaatgtaggacgctataaaattaataaaaaacttcatattaagaatcgcctcttcaatcagagacttgctgaaacgcttgttgatcctgaaacaggagaaatccttgctgaaaaaggccagattcttgatagaagaacgcttgataaagtactgccatacttagaaaacggaatcggttttagaaagctgtatccgaatggcggcgttgttgaagatgaagtgactcttcaatcaattaaaatctttgctccgactgatcaagaaggagaacaggttatcaatgtaatcggcaatgcttacatcgaagaagagattaaaaacatcacgcctgctgatattatttcttcaatcagctacttcttcaacctgctgcacggagtaggcgacacagatgatatcgatcatcttggaaaccgccgtttacgttctgtaggcgagcttctccagaaccaattccgtatcggtttaagccgtatggagcgtgtggttcgtgagagaatgtcaattcaagatacgaatacaattacgcctcagcagctgatcaatattcgtcctgttattgcgtccattaaagagttctttggaagctcacagctttctcaattcatggatcagacgaacccgcttgctgaattaacgcacaagcgtcgtctgtcagcattaggaccgggcggattgacacgtgagcgtgccggaatggaagtgcgtgacgttcactactcccactatggccgtatgtgtccgattgaaacgcctgagggcccgaacatcggtttgatcaactcactatcatcttatgcaaaagtaaaccgttttggctttattgaaacgccatatcgccgcgttgaccctgaaacagggaaggtaacgggcagaatcgattacttaactgctgatgaagaggataactatgttgtcgctcaagcgaatgctcgtcttgatgacgaaggcgcctttattgatgacagcatcgtagctcgtttccgcggggagaacaccgttgtttccagaaatcgtgtagactacatggatgtatcgcctaagcaggttgtatctgctgcgacagcatgtatcccgttcttagaaaacgatgactccaaccgtgccctcatgggagcgaacatgcagcgtcaggctgtgcctttgatgcagccggaagcgccatttgttggaactggtatggaatacgtatcaggaaaagactctggtgccgctgttatttgtaaacaccctggtatcgttgaacgcgtagaagccaaaaacgtttgggttcgccgttatgaagaagtagacggtcaaaaagtaaaaggaaacctggataaatacagcctgctgaaatttgtccgctctaaccaaggtacgtgctacaaccagcgtccgatcgtaagtgtcggcgatgaagtggtaaaaggagaaatccttgctgacggtccttctatggagcttggtgaacttgcacttggccgtaacgtaatggtcggcttcatgacgtgggatggctacaactatgaggatgccatcatcatgagtgaacgcctagtgaaggatgatgtttatacatctatccacattgaagaatacgaatcagaagcacgtgatacgaaacttggacctgaagaaatcactcgcgatattccaaacgtcggtgaagatgcgcttcgcaatcttgatgaccgcggaatcatccgtattggggcagaagtaaaagacggagatcttcttgttggtaaagtaacgcctaaaggcgtaactgaactgactgccgaagaacgccttcttcacgccatctttggcgagaaagcccgcgaggttcgtgatacttctcttcgtgtgcctcatggcggcggcggaattatccatgacgttaaagtcttcaaccgtgaagacggagacgaacttcctccaggtgttaaccagttagtacgcgtatatatcgttcagaaacgtaagatttctgaaggggataaaatggccggtcgtcacggtaacaaaggtgttatctctaagattcttcctgaagaggatatgccttaccttcctgacggcacaccaattgatatcatgcttaacccgctgggcgtaccatcacgtatgaacatcgggcaggtattggaacttcacatgggtatggccgctcgttaccttggcattcacattgcatctcctgtatttgacggagcgcgagaagaggatgtctgggaaacacttgaagaagccggcatgtctcgtgacgccaaaacagtgctttacgacggacgtactggagagccgtttgataaccgtgtatctgtcggtatcatgtacatgatcaaactggctcacatggttgacgataaacttcatgcacgctctacaggcccttactcacttgttacgcagcagcctcttggcggtaaagcgcaatttggcggacagcgttttggtgagatggaggtttgggcacttgaagcttacggtgcggcttacactcttcaagaaattctgactgttaagtctgatgacgtggttggacgtgtgaaaacatacgaagccatcgttaaaggcgacaatgttcctgaaccaggtgttccggaatcattcaaagtattaatcaaagaacttcaaagcttaggtatggatgtcaaaatcctttctggtgatgaagaagaaatagaaatgagagatttagaagacgaagaagatgcgaaacaagctgacggcctggcattatcaggtgatgaagagccggaagaaacagcatctgcagacgttgaacgcgatgtagtaacaaaagaataatctctagttataaaggcaagtgacatcggttaatccgaagataaaaagggaggtaggccccttgctagatgtgaacaattttgagtatatgaacatcggtcttgcttcaccagataaaatccgttcatggtcttttggtgaagtgaaaaagcctgaaacgataaactatcgtacgttaaaacctgaaaaggacggtctattctgcgaacgcattttcggaccgactaaggactgggaatgtcattgcgggaagtacaagcgagttcgttataaaggcgtagtttgtgaccgctgcggagtcgaagtaacacgggctaaagtccgtcgtgagagaatggggcacattgaactggctgccccagtttcccacatttggtatttcaaaggtattccaagccgtatgggtcttgtgctggatatgtcacctcgtgctttagaagaagtcatttactttgcttcttacgttgtaactgatccggcgaatacaccgcttgaaaagaaacagcttctgtctgagaaagaataccgtgcttatcttgataaatacggtaataaattccaagcatctatgggtgctgaagcaattcataaacttcttcaagatatcgatcttgtaaaagaagttgatatgttaaaagaagagctgaaaacttcacaaggacaacgccgtactcgtgcgatcaaacgtcttgaagttttagaagccttccgtaactcaggaaacaagccttcttggatgatccttgatgtgcttcctgttattcctccggagcttagaccgatggttcagctagatggcggacgttttgcgacttctgatttgaatgacctttatcgtcgtgtcatcaaccgtaacaatcgtttgaaacgccttttggaccttggtgcgcctagcatcatcgttcaaaacgaaaagcgtatgcttcaagaggctgtcgatgccctaattgacaacggccgccgcggacgccctgtaacaggtcctggaaacagaccgttaaaatctctttctcacatgctgaaagggaagcaaggccgtttccgtcaaaaccttcttggtaaacgtgtcgattactccggacgttctgtaatcgttgttggtcctcatttgaaaatgtaccaatgcggattaccgaaggaaatggcacttgaacttttcaaacctttcgttatgaaagaacttgttgaaaaaggtcttgctcacaacattaagagtgcgaaacgcaaaattgagcgcgtacagcctgaagtttgggatgtactagaatcagttattaaggagcatccggtactgctgaaccgtgcccctacacttcacagattaggtatccaggcgtttgaaccaacgcttgttgaaggacgcgcaatccgtcttcacccgctcgtatgtacagcttacaacgctgactttgacggtgaccaaatggcggttcacgtaccattatctgctgaagcacaagctgaagcacgcatcttgatgcttgctgctcaaaacatcttgaaccctaaagatggtaaaccggttgtaacaccgtctcaggatatggtactaggtaactattacctgacacttgagcgtgccggtgctgtcggtgaaggtatggtcttcaagaatacagacgaagcgcttcttgcttatcaaaacggatatgttcaccttcatacgagagtagctgttgcagctaactcacttaagaatgtgacatttaccgaagaacagcgctcaaaattgttaattacaactgtcggtaagcttgtcttcaatgaaattcttccggaatcattcccttacatgaatgaaccaacgaagagcaacattgaagagaaaacacctgaccgtttcttcttagaaaaaggtgctgatgttaaagctgttatcgcacagcagccaatcaatgcgccgtttaaaaaaggcattctgggtaaaatcatcgcggaaatctttaaacgattccatattacggaaacgtctaaaatgcttgaccgcatgaaaaacctaggtttcaaatattcaactaaagctggtattacagttggggtttctgacatcgtcgtactcgatgataaacaagaaattcttgaggaagcgcaaagcaaagttgacaacgttatgaagcaattccgccgcggtcttatcactgaagaagaacgctatgagagagtcatctctatctggagtgctgcaaaagacgttatccaaggcaaactgatgaaatcacttgatgaactcaacccgatctacatgatgagtgactctggtgcccgtggtaacgcatctaactttacgcagcttgccggaatgcgcggcctgatggccaacccggctggacgtatcattgagttgccgatcaaatcaagtttccgtgaaggtctgacagtattggagtactttatctccacacacggtgcgcgtaaaggtcttgccgataccgctcttaaaactgctgactcaggttaccttacacgccgtctcgttgacgttgctcaggatgttatcatccgtgaaactgattgcggaactgaccgaggcattcttgctaagcctcttaaagaaggaactgaaacaattgagcgcttagaagaacgcttaatcggacgttttgcaagaaaacaagtgaagcaccctgaaacaggtgaagtgcttgtgaatgaaaacgaactgatcgatgaagataaagcactggagattgtcgaagccggcattgaagaagtgtggatccgttctgccttcacatgtaatacgcctcatggtgtatgtaaacgatgctatggccgaaatcttgcaactggctccgatgttgaagtcggtgaagctgtcggaatcattgctgcccaatcaatcggtgagcctggtacacagttaacaatgcgtacattccatacaggcggggttgccggagacgatatcacacagggtcttccgcgtatccaagagcttttcgaagcgcgtaatccgaaaggtcaggcaacaattacagaaatcgacggtacagtcgttgagatcaatgaagttcgtgataagcaacaggaaattgtggttcaaggcgcagtggaaacacgttcttatacggcaccttacaactcccgcctgaaagtagcggaaggagataaaattactcgaggccaagtactgacagaaggttcaatcgatccgaaagaacttcttaaagtgactgacctgacgactgttcaagagtatcttctccatgaggttcaaaaggtttaccgtatgcagggtgttgaaatcggtgataaacacgtagaagtaatggttcgccagatgcttcgcaaagtacgcgtgattgatgccggtgacactgatgtgcttccaggtacattgcttgatattcaccaatttactgaagcgaacaaaaaggtattgcttgaaggcaaccgaccagctacaggccgtcctgtcttactcggtattacaaaagcatctcttgaaactgattcattcttatctgctgcttccttccaggaaacaacacgtgtccttacagatgcagcgatcaaaggtaagcgtgacgagcttctcggcttgaaagagaatgttatcatcggtaagcttgttccagcaggtacaggaatgatgaaataccgtaaagtaaaaccagtatcaaatgttcagccgactgacgatatggtcccggttgaataactgatttaactctgctgaaagactgcaaaaacagtctttcagcagatatatttatgaaaaagtcactctatgagaagaacgaatctaaaaaatgtcataccttgttgacattcgtctcctagaatgataatataaccaaggtgctcgaaataaacctgttactttggaggatatgtttatgtcttatgataaagtatcacaggccaaatcaattattattggtacgaagcaaacagtgaaagctctaaagcgaggttcagtaaaggaagtagtcgttgcaaaagacgcagatccgatactcacgtcaagtgttgtttcacttgctgaagatcaaggtatctctgtctcaatggttgaatccatgaaaaagctcggcaaagcctgcggaattgaggtaggagcagccgctgttgccattattttataacgtacttttgtttttgcgtaagattccatcttgtgtaaagacattgttttttgccttttgatgaaccacctgggtatgtgggttataaaacgtaatgaagggaggaaaaattcatgcctacaattaatcagctaattcgcaaaggacgcgtgagtaaagtagaaaactcaaagtctcctgcacttaacaaaggatacaacagctttaaaaaagagcacactaacgtatcttctccacaaaaacgcggggtatgtactcgtgttggtacaatgacaccgaaaaaaccgaactcagcacttcgtaaatatgctcgtgttcgtttgactaacggaatcgaggttactgcttacattcctggtatcggtcacaacctgcaagagcacagtgttgtacttatccgcggcggacgtgtaaaagacttaccaggggtacgttaccacatcgttcgtggtgcgcttgatactgctggagttgaaaaccgtgcacaaggccgttctaaatacggtacgaaaaaacctaaagcaaaataatatacgaaaatacgcataattgatgaagggaggatattcagatgccacgtaaaggtcctgtagcaaaaagagatgttttacctgatccgatttacaactctaagcttgtatctcgtttaatcaacaaaatgatgatcgatggtaaaaaaggtaagtctcaaacgatcctatacaagtcattcgatatcattaaagaacgtactggcaatgatgcaatggaggttttcgaacaagcattgaaaaacatcatgcctgtacttgaagtaaaagcacgccgtgtaggtggtgcgaactaccaagttcctgtagaagttcgtcctgaacgtcgtacgactcttggacttcgctggttagttaactacgctcgtcttcgtggagaaaaaacgatggaagagcgtttagctaacgaaatccttgacgcagctaacaacactggtgctgctgttaagaaacgtgaagacactcataagatggctgaagcaaacaaagcatttgctcactatcgctggtaggatttatagattaacaaaacacaatttcctaataaggaaggagaaattacccaatggcaagagagttctccttagaaaaaactcgtaatatcggtatcatggctcacatcgatgccggtaaaacgactactacagaacgtatcttgttctatactggtcgtatccacaaaattggtgaaactcatgaaggagcttcacaaatggactggatggagcaggaacaagaacgtggtatcacaatcacttccgctgcgactactgcacagtggaaaggataccgcgtaaacatcatcgatactccaggacacgtagacttcacagttgaagttgaacgttctcttcgtgtacttgatggtgctgttgctgtacttgacgcgcaatcaggcgttgagcctcaaacagaaactgtttggcgtcaggcaacaacttatggagtaccgcgtatcgtttttgttaacaaaatggacaaaatcggtgcagacttcctttactctgtaggaactttaagagaccgtcttcaagcaaacgctcatgcaattcaattgccgatcggtgctgaagataacttcgaaggtatcattgaccttgtagaaaacgttgcgtatttctacgaagatgacctcggaactcgttctgatgcaaaagaaatccctgaagagtacaaagagcaagctgaagagcttcgcaacagccttattgaagctgtatgtgagcttgatgaagagcttatggataagtaccttgagggtgaagaaatcacaattgacgagttaaaagcaggaattcgtaaaggtacattaaatgttgaattctaccctgttcttgttggttctgccttcaaaaacaaaggtgttcaactagtacttgatgctgttcttgactaccttcctgcaccaactgacgttgctgcaatcaaaggtacacgtcctgatacaaatgaagagattgagcgtcattcttctgacgaagagccattctctgcattagcatttaaagttatgactgacccttacgttggtaagttgacgttcttccgtgtgtactctggaacacttgattctggttcatacgtgaaaaactctactaaaggcaaacgtgagcgtgttggacgtattcttcaaatgcacgctaacagccgtgaagaaatctctactgtatacgcaggggatatcgcagctgctgtaggtctaaaagatacaactactggagatactctatgtgatgagaaggatcttgttatccttgagtcaatggaattcccagaaccagttatcgacgttgctattgagcctaaatcaaaagctgaccaagataaaatgggtatcgctttagcgaaacttgctgaagaagatcctacattccgtactcaaacaaacccagaaactggccaaacgatcatctctggtatgggtgaacttcaccttgatatcattgttgaccgtatgaaacgcgaatttaaagtagaagccaatgttggtgctcctcaagttgcgtaccgtgaaacattccgtaccggtgcaaaagttgaaggtaaattcgtacgtcagtctggtggacgcggtcagttcggacacgtttggatcgaattcgaaccaaacgaagaaggcgctggctttgaatttgaaaatgcgattgtcggtggggtcgttcctcgtgaatacatcccagctgttcaagcaggtctggaagatgcactcgaaaatggtgtactagcaggcttcccgcttatcgacattaaagctaaacttttcgacggttcttaccatgatgttgactcaaacgaaatggcatttaaagtcgctgcttctatggcattgaaaaatgcagtcagcaaatgtaacccagttcttcttgaaccaatcatgaaagtggaagtggttattccagaagaatatatgggagatatcatgggtgatatcacttcacgtcgcggacgcgtagaaggtatggaagcacgcggtaacgctcaagttgttcgtgctatggttcctcttgctgaaatgttcggttacgctactgcacttcgttctaatacgcaaggtcgcggtacgttcactatgcacatggatcactacgaagaagtgccgaagagcgtcgcagaagaaattatcaaaaaaaataaaggcgaataattgattttgccgcttaactcaagtataactactattgtaagatgaggaagtgaaagctttctttcacttcctatcactctatacattactaattaaaagctcttaaggaggattttagaatggctaaagaaaaattcgaccgttccaaatcacatgccaatattggtacaattggacacgttgaccatggtaaaacaactttaactgctgctatcacaacagtacttcataagaaatctggtaaaggtacagctatggcgtacgatcaaattgatggtgctccagaagaacgcgagcgcggtatcacaatctctactgcacacgttgagtacgaaactgaaactcgtcactatgcacacgttgactgcccaggacacgctgactatgttaaaaacatgatcactggtgctgcgcaaatggacggagctatccttgtagtatctgctgctgatggcccaatgccacaaactcgtgagcacatccttctttctaaaaacgttggtgtaccatacatcgttgtattcttaaacaaatgcgacatggtagacgacgaagagcttcttgaactagttgaaatggaagttcgcgatcttcttagcgaatacgacttccctggtgatgatgtaccagttgttaaaggttctgctcttaaagctcttgaaggagacgctgagtgggaagctaaaatcttcgaacttatggatgcggttgatgagtacatcccaactccagaacgcgacactgaaaaaccattcatgatgccagttgaggacgtattctcaatcactggtcgtggtacagttgctactggccgtgtagaacgcggacaagttaaagtcggtgacgaagttgaaatcatcggtcttcaagaagagaacaagaaaacaactgttacaggtgttgaaatgttccgtaagcttcttgattacgctgaagctggtgacaacattggtgcccttcttcgcggtgtatctcgtgaagaaatccaacgtggtcaagtacttgctaaaccaggtacaatcactccacacagcaaattcaaagctgaagtttacgttctttctaaagaagagggtggacgtcatactccattcttctctaactaccgtcctcagttctacttccgtacaactgacgtaactggtatcatccatcttccagaaggcgtagaaatggttatgcctggagataacactgaaatgaacgttgaacttatttctacaatcgctatcgaagaaggaactcgtttctctattcgtgaaggcggacgtactgttggttcaggcgttgtttctacaatcactgagtaatagtatggttttaaacgagacccctgtgggtctcgttttttgtttgcttatctttttcttgtataataggatctatcatattcgaggggttaatatttatgattcctgaaaagaaatcaatcgcaatcatgaaagaactaagcattggaaatacaaagcaaatgctgatgattaatggagttgacgtgaaaaatccattgctgctttttttacatggcgggccgggaacgccgcaaatcggatatgttagacattatcaaaaagagctggaacagtattttacagtagttcattgggatcagagaggatcggggctttcttattctaagcgaatttcgcatcactctatgacaataaatcacttcattaaagatacaatccaagtcactcaatggcttttagctcatttttcaaaatcaaaactttacctagccggtcattcttggggatcaatactggcgcttcatgtgctgcagcagcgtcctgatttattttacacgtattatggaatcagccaggttgttaacccgcaagatgaagaatcaactgcttatcaacatattcgtgaaatttccgaatcaaaaaaagccagcatattatctttccttacacgtttcattggtgctccgccttggaagcaggatatccagcaccttatctatcggttttgtgttgagctaaccaggggaggattcactcaccgtcatcgtcaatctctcgctgtattatttcaaatgcttactggcaatgagtatggagtgcggaacatgcacagcttccttaatggattgcgcttcagtaaaaaacatttaactgatgagttgtaccggtttaatgcttttacatcagttccttctattaaagtaccgtgtgttttcatttcagggaaacatgacttaattgttcctgcagaaatatcgaaacagtattatcaagaacttgaggcacctgaaaagcgctggtttcaatttgagaattcagctcacaccccgcatattgaggagccatcattattcgcgaacacattaagtcggcatgcacgacaccatttatgatagatccttgataaataagaaaaacccctgtataataaaaaaagtgtgcaaatcatgcatattttaaataagtcttgcaacatgcgcctattttctgtataatggtgtatgttggtctttgactgcgatgaagtgagaggttgctgacacacccggccgctttgccatggcaaggtgttcaggtttttctcacggagaactgtctaacgtgatgtaggcgaaaaggagggaaaataatggcaaaacaaaaaattcgtattcgtttgaaagcatatgatcatagaatccttgatcaatctgcagagaagattgttgaaacggcaaaacgttctggtgccagcgtatctggtccgattccgttgccaactgaaaaatcagtttacacaatccttcgtgcggtgcacaaatacaaagattctcgtgagcaatttgaaatgcgtacacataaacgtttaatcgacattgtgaacccaacaccacaaactgttgatgctcttatgcgattagacttaccatctggtgtcgatatcgaaattaaactttaattctaaaatatagaatgatcttaataggaggtgtgacgaatgaccaaaggaatcttaggaagaaaaattggtatgacgcaagtattcgctgagaatggtgatcttattccggtaactgttatcgaggctgctccaaacgttgttcttcaaaagaaaacagctgaaaacgacggttacgaagcaatccagcttggttttgacgacaagcgtgaaaagctttctaacaaacctgaaaaagggcacgttgcaaaagcggaaactgctcctaagcgcttcgttaaagaattacgcggagtggaaatggatgcgtatgaagttggtcaggaagtcaaggttgaaattttctctgctggagaaatcgtagatgtaacaggagtatctaaaggtaaaggtttccaaggtgcgatcaagcgccacggacaatctcgcggacctatgtctcacggttcacgctaccaccgtcgtcctggttcaatgggacctgtagatcctaaccgtgtattcaaaggtaaattattacctggacgtatgggcggagagcaaatcactgttcaaaaccttgaaatcgtaaaagttgatgcagaacgcaatcttcttttgatcaaaggtaacgtacctggtgcgaagaaatctttaatcactgttaaaagtgctgttaaatctaaataattctcttaggaaaggaggaaattgattatgccaaaagtagcattatacaaccaaaacggttctactgctggtgacatcgaattaaacgcttctgtatttggtatcgaaccaaatgagagtgttgtattcgacgctattcttatgcaaagagcttccttacgtcaaggaactcacaaagtaaaaaatcgttctgaagtacgcggcggaggtcgtaaaccatggcgtcaaaaaggtactggacgtgcccgtcaaggttcaatccgttcaccgcaatggcgcggaggtggtgtcgtattcggcccaacaccacgcagctattcttataaattacctaaaaaagttcgccgcttggcaatcaaatcagtattgtcttctaaagtgatcgacaacaacatcatcgttcttgaagatcttactcttgatacggctaaaacaaaagaaatggcagctatccttaaaggattatctgttgagaaaaaagctttaatcgtaactgcggatgcaaacgaagcagtagcattatctgctcgtaacattcctggagttactgttgttgaagctaacggaatcaacgttttagacgttgtcaaccacgagaagcttctgattacaaaagcagcggttgaaaaagtagaggaggtgcttgcataatgaaagatcctcgtgatgttctaaagcgccccgtcattactgaacgttctgccgatttaatgactgaaaaaaaatatacttttgaagttgatgtaagagctaacaaaacagaagtgaaagacgcggttgaaagcatctttggagtgaaagttgacaaagtcaacatcatgaactacaaaggcaaatcaaaacgtgttggacgctacactggtatgactagccgtcgcagaaaagcgatcgtaaaacttactgcagacagcaaagaaatcgaaatttttgaagcttaattatctgtaaaaagaaggagggaaattcaaaatggcgattaaaaagtataaaccgacctctaatggacgtcgtggcatgacaacttcagattttgctgaaatcacgactgacaagccggaaaaatccttgcttgctccccttcacaaaaaaggcggacgtaacaaccaaggtaaattgactgtacgtcaccaaggtggcggacataaacgccaataccgtgttatcgacttcaaacgcgataaagatggtatacctggacgcgttgctacagttgaatacgatccaaaccgttcagctaacatcgctctaatcaactatgcagacggagaaaaacgttacattcttgctcctaaaggaattcaagtaggtactgaaatcatgtcaggtcctgaagctgacattaaagtaggtaatgcacttccacttatcaacatccctgttggtacagttgtgcataacattgaattaaaacctggtaaaggcggacagcttgtacgttcagctggtacatctgctcaggttcttggtaaagaaggtaaatacgttcttgtacgtcttaactctggtgaagttcgcatgatcctttctgcttgccgtgcttctatcggtcaagtaggtaacgaacagcacgaacttatcaacattggtaaagctggacgttctcgctggaaaggcatccgtcctacagttcgtggttctgtaatgaaccctaacgatcacccacacggtggtggtgaaggacgtgcgccaatcggacgtaaatcaccaatgtctccatggggcaaaccaactcttggattcaagactcgtaagaaaaagaacaaatccgataaatttatcgtacgtcgtcgtaaaaataaataacggggttgtctacggttcttttcggaccgtagtgcaatcacgaagggaggttccaaaatggctcgcagcttaaaaaaaggaccatttgtcgatggacacttgatgactaaaatcgagaaattaaatgaaacagacaagaaacaagtcgtaaaaacttggtctcgtcgttctactattttcccacagtttattggtcacacaatcgcagtctatgacggacgtaaacacgtgcctgtattcatctctgaagatatggtagggcacaagttgggtgaattcgctccaactcgtacgtacaaaggtcatgctagtgatgacaaaaaaacaagacgctaagagaggaggcttttaaatgcaagctaaagctgttgcaagaacagtccgtattgctcctcgtaaagcacgtctagtaatggacctgattcgaggcaagcaagtaggtgaggcagtatcaatcttgaaccttacaccaagagctgcttctccaattatcgagaaagtattaaaatccgctattgcaaatgctgagcataactatgaaatggacgctaacaacctggttatttctcaagcattcgttgacgaaggccctacgttaaaaagattccgcccacgtgctatgggacgtgcgagccaaatcaacaaacgtacgagccacattacaatcgttgtatcagaaaagaaggagggataagtagtgggtcaaaaggtaaatccagtcggtcttcgtatcggagtcattcgtgattgggaatctaagtggtacgctggtaaagattacgctgacttcctgcacgaagatttaaaaattcgtgaatacattagcaaacgcctttctgacgcttctgtttctaaagtagaaattgagcgtgcagcaaaccgcgttaacattacgatccacacagctaagcctggtatggttatcggtaaaggcggttctgaagtcgaagcacttcgcaaagcccttaacagccttactggcaagcgtgtacacattaacattcttgaaatcaaaagagcagatcttgatgcacagctagttgctgacaacatcgctcgtcaattagaaaaccgtgtttctttccgccgtgcgcagaaacaacaaatccaacgtactatgcgtgctggagcacaaggtgtgaaaacaatggtttctggtcgtcttggcggtgcagatatcgctcgttctgaatactacagtgaaggaactgttccattgcacacattacgtgcggacattgactatgcaacatctgaagctgatactacttacggtaagcttggtgtaaaagtctggatctatcgtggagaggttcttcctactaagaagaaaaatgaggaaggaggaaaataatatgttattaccaaaacgcgttaaatatcgcagagagcatcgcggaaaaatgcgtggccgtgcgaaaggcggtactgaagtacatttcggagaattcggtatccaagctctagaagcttcttggattactaaccgtcaaatcgaagctgcacgtattgcgatgactcgttacatgaaacgtggcggtaaagtttggatcaaaattttcccttctaaaccttacactgctaaaccacttgaggtacgtatgggatccggtaaaggggctccagaaggttgggtagctgttgtaaaaccgggcaaagttttatttgaaatttctggtgtgtctgaagaggttgctcgtgaagcgcttcgccttgcatctcacaaattgccaattaaaacgaagttcgtaaaacgtgaagaaattggtggtgaatcaaatgaaagctaatgaaattcgtgaccttaccactgctgaaattgaacaaaaagtaaagtctcttaaagaagaacttttcaatcttcgctttcaattagcgacaggacaacttgaaaatactgctcgcattcgtgaagtgcgcaaagctatcgcgcgcatgaaaactgtgattcgtgaaagagaaattgctgctaataaataatcactgaggggaggtcgtgagcatgagcgaacgtaaccaacgcaaagtttaccaaggccgtgttgtttctgacaaaatggataaaaccattactgttgttgttgagacatacaaaaaacatacactttacggtaaacgcgtaaaatactcaaaaaaattcaaagcacatgatgaaaataatcaagctaaaatcggtgacatcgttaagatcatggaaactcgtccattgtctgcaactaagcgtttccgtctagttgaagttgtcgaagaagctgttattatctaataaagttcggaattctttttccgaagggaggtaacaaataatgattcaacaagagactcgtttaaaagtagctgacaactctggcgcacgtgaagtacttactattaaagttcttggtggttctggacgtaaaacagctaacattggtgatgtaattgtttgcacggttaaacaagcaacaccaggaggcgttgtcaaaaaaggtgaagtcgtaaaagctgttatcgttcgcactaaaagcggagcgcgcagaagtgacggttcatacatcagcttcgatgagaatgcatgtgttatcatccgtgacgacaagagcccacgcggaactcgtatcttcggaccagttgctcgtgaattgcgtgaaaacaactttatgaaaattgtttctctagctccagaagttatctaattgaaataaatgccttactcaaggaggtgcgatcaggatgcatgtaaaaaaaggcgataaagttatggttatctctggtaaagataaaggcaaacaaggaacaatccttgctgctttccctaaaaaggaccgcgttttagttgaaggtgttaacatggtaaagaaacactctaaaccaactcaagctaaccctcaaggcggtatttctaatcaagaggcgccaattcatgtatcaaacgttatgccgctcgatcctaaaacaggtgaagtgactcgcgtaggatacaaagtggaagatggcaaaaaagttcgtgtagcaaaaaaatctgggcaagttctagataaatagtattaaaaggaagggaggtctatctcatgaaccgccttaaagaaaagtacaataaagaaattgcacctgctttaatgactaagttcaactatgattcagtcatgcaagtgcctaaaatcgaaaaaatcgtaatcaacatgggtgttggtgacgctgttcaaaacgccaaagcaatcgacagtgctgttgaggaattaacgtttatcgcaggtcaaaaacctgtcgttactcgtgcgaagaaatcaattgctggattccgtcttcgtgagggaatgcctatcggtgcgaaagtaactcttcgcggagagcgcatgtatgatttccttgataaacttatttctgtatctttaccgcgtgtacgtgacttccgcggggtttctaaaaaatctttcgacggtcgcggtaactacacacttggtatcaaagaacagttaatcttccctgaaattgactacgataaagtaacaaaggttcgcggaatggacatcgttatcgtaacaactgctaatactgacgaagaagctcgtgagctattaactcaagtaggtatgccgttccagaaataatcaatgaaagggaggcgaaatcgtggctaaaaagtctatgattgcgaaacaacaacgtacaccaaagtttaaagtacaagagtacacacgctgtgaacgctgcggacgtccgcattcagtcattcgtaaatttaaactttgccgtatttgtttccgtgagcttgcatataaaggacaaattcctggcgtgaaaaaagccagctggtaatccccaagaaagggaaggaggtaattatataatggttatgacagatccaattgcagatatgctaactcgtattcgcaatgcaaacatggtacgtcatgagaagcttgaaattcctgcttctaaattgaaaagagaaattgctgaaattttaaagcgtgaaggtttcattcgtgacgttgagttcgtagaagacagcaaacaaggtattatccgcgttttcttgaaatacggacaaaacaacgagcgcgttatcactggtcttaaaagaatcagcaagcctggtttgcgtgtttatgctaaatctaatgaagtaccccgcgtacttaacggtcttggaatcgcgattatttctacatcacaaggtgttttaacggacaaagaagcccgtgcaaaacaagctggtggagaagttctagcatacgtttggtaagaagtttaacatgaatggaggtgtttggtatgtctcgtgtaggtaagaagctacttgagattccttctgatgttacagtaacgttaaatgataacaacactgtagctgtgaaaggaccaaaaggagaattaactcgtacgtttcaccctgatatggagattaaagtagaggacaatgtgcttacagtcgctcgtccttctgatcaaaaagagcaccgtgccctgcatggtacgactcgcagtctgcttggcaacatggttgaaggtgtatctaaaggatttgaaagaggtttggaattagtcggtgtcggttaccgtgcttctaaatccggaaataaacttgttttaaacgttggatactctcatcctgttgagatcgttcctgaagaaggcatcgaaatcgaagttccttctcaaacaaaagtagttgtaaaaggtacagacaaagaacgcgtaggagctattgctgctaacatccgcgctgtacgttctccagagccttacaaaggtaaaggaatccgctacgaaggtgaagttgttcgccgtaaagaaggtaaatctgctaagtaagatcgcttaaagtgaagaaaggagtgacctagatgattacgaaaactagcaaaaatgctgctcgtcttaaaagacacgctcgtgttcgcgctaaactttccggtactgctgaaagaccgcgcctgaacgttttccgttctaacaagcacatttacgctcaaatcatcgatgatgtaaatggtgtaacacttgctagtgcatctactctcgataaagacttgaacgttgaaagcactggagatacttctgctgctactaaagttggagaattagttgcaaaacgcgctgctgaaaaaggcatttctgacgtagtatttgaccgtggcggatacttataccatggacgtgtaaaagctttggctgatgccgctcgtgaagctggacttaaattttaataaaagaaggagggacacatgattatgcgtcgtattgacccaagcaaattagagttagaagaacgcttagttacggttaaccgcgtagcgaaagttgttaaaggtggtcgtcgtttccgcttcgcagctctagtcgttgtcggtgacaaaaacggacacgtaggattcggtactggtaaagcacaagaagtaccagaagcgattcgcaaagctgttgaagatgcgaaaaagaatttgattgaagtaccaatggttggaactacaattccacacgaaatcatcggacgtttcggtgcaggtaacatcttgttaaaacctgcttctgaaggtactggagttatcgctggaggccctgtacgtgcggtacttgagctagctggtgtagctgatatcctttctaagtctttaggttctaacacaccgatcaacatgattcgtgcaacacttcaaggtttaagtgaacttaaacgtgctgaagacgttgcgaagcttcgtggaaaatctgtagaagaactgttaggataaggagggaacattaatggctaaattagaaattaccctcaaacgaagtgtaatcggtcgcccggaagaccaacgcgttactgtaagaacacttggtttaaagaaaacaaaccaaactgttgttcatgaagacaacgctgcgatccgtggtatgattaataaagtatctcatttagtttctgttaaagaacaataaaaatatttgatcggataaggaggtgtcctaatgaaacttcatgaattaaaaccttcagaaggttcacgcaaaacgcgtaatcgcgtaggtcgtggtattggttctggcaacggtaaaacagctggtaaaggtcacaaaggtcaaaacgctcgttctggcggcggtgtacgccctggattcgaggggggacaaatgcctttattccaacgtcttcctaaacgtggtttcactaacatcaaccgcaaggaatacgctgtagtcaacctagacaaattgaacggttttgcagaaggaacggaagtcactcctgaacttcttctagagactggtgttattagcaaacttaatgcaggagtaaagattcttggcaacggtaaattagagaaaaaattaactgtaaaagccaataaattctctgcttctgcgaaagaagctgttgaagctgctggcggtacagctgaggtgatctaacttgtttaaaacaatctccaactttatgcgtgtgagtgatatcaggaataaaatcatattcactttactcatgcttatcgtctttcgcataggtgcgtttattcctgtgccttacgttaacgctgaagcgttacaggcacagtctcaaatgggtgtttttgatctccttaatacatttggcggcggtgcgctttaccaattttccattttcgcaatgggaattactccttatatcacggcttcgatcatcattcagctgcttcagatggatgtggtaccgaagtttaccgagtggtctaagcaaggtgaagttggccgccgtaaattagctcagttcacaaggtactttacgattgtgcttggtttcatccaagcgttaggtatgtcatatggattcaacaatctggcaaacggtatgctgatcgaaaaatccggtgtatcgacatatcttatcattgctttagtgctcactggcggaactgcctttttaatgtggcttggggaacaaattacttctcatggagtaggcaacggaatatcgatcattatcttcgcggggattgtgtctagtattccaaaaacaattgggcaaatatatgagactcaatttgtcggcagcaacgatcagttgtttattcatattgtgaaagtcgcacttcttgtgattgcgattttagcagttattgttggagttattttcattcagcaagccgtacggaaaattgcgattcaatatgctaaaggcacaggtcgttcacctgctggcggaggtcagtctacacaccttccattgaaagtgaatcctgcaggggttattccggtaatctttgcggttgcgtttttgataacgccgcggacgatcgcgtcattctttggaacaaacgatgtgacaaagtggattcaaaacaactttgataatacgcatccggtgggtatggcgatatatgttgcgttgattattgcctttacgtacttttatgcttttgtacaggtaaaccctgaacaaatggctgataaccttaaaaaacagggtggctatatcccgggggttcgtccagggaaaatgactcaagatagaattacgagcattttgtatcgacttacgtttgtgggttctatattcttagccgtgatttccattcttcctatctttttcattcaattcgctggattgcctcaaagtgcacaaattggcggaacatctttgttaattgttgtcggggtagccttggagacaatgaaacaactagaaagccagttggtgaaacgaaactaccgtggatttatgaaaaactagaggaaatggatttatccattccctcttaataaagagaggacgggggaaatccgaatgaacttagtcttaatggggcttcctggtgccggtaaaggcacacagggcgaacgaattgttgaggattatgggattcctcatatctcaacaggagatatgttccgtgctgctatgaaagaagaaacaccactcggactcgaagcaaaatcttatattgataagggagagctcgtacctgacgaagtcacaatcggaattgtaaaagagagacttggcaaagatgattgtgaaagaggttttcttctggacggatttccgcgaacagtcgctcaagccgaagctcttgaagaaattcttgaggaatacggcaagccgattgattatgtcattaacattgaagtcgacaaagatgttctgatggaacgtctgactggacgcagaatttgcagtgtttgcggcacaacctatcatttagtctttaatccgccgaaaacgccgggtatttgtgataaagacggaggcgaactctatcaacgggcagatgataatgaggaaacagtctctaaacggcttgaggtaaacatgaagcaaactcagcctttactcgatttctattcagagaaaggttatcttgcaaacgtgaatggccagcaggacattcaagacgtttatgcagatgtgaaggatcttcttggaggattaaaaaaatgattatctgtaaaaccccacgtgaacttggtatcatgcgggaagcagggcgaatcgtggctttaactcatgaagagttaaaaaagcacattaaaccaggaatctcgacaaaagaattggatcaaattgccgaacgttttattaagaagcagggtgcaatcccatcttttaaggggtataatgggtttcgcgggagcatttgcgtatcagttaatgaagaactcgttcacggcatacctggcagcagggtgctgaaggacggtgacatcatcagtattgatatcggtgctaaattaaatggttatcatggtgactctgcatggacatatccggtaggaaacatcagcgatgatgacaaaaaacttctggaagtgacagaggagtctttatataaaggcttgcaggaagcaaaaccaggtgaacgtttgtcgaatatttcccacgcaatacaaacgtatgtcgaaaatgagcagttttcagttgttagggagtatgtcggacatggtgttggtcaagacttgcatgaggacccgcaaattcctcattacggtccgcccaacaaaggaccacggcttaaacctggcatggttctcgctattgaacctatggtgaacgctggcagccgctacgtgaaaacattggctgataactggacggttgtaacggtagatgggaaaaagtgtgctcattttgaacatacgattgcgattacggaaacgggttttgatatactgacgagagtctagatgatgaaaataattccgaagacagatgtttttcaagcttgatagggcagaaagcttgggtgaacattggcaagaccgaattcatcttgcttcttgtcgttggaattttaaccatcatcaatgtactaacagcagacggagaaaagcgtacatttcattctcctaagaaaaagaatatcaatcatttaaccctttatgattgcgtatctccggaagttcagaacagtataaacgaaacagggcgtgtgacaaacttcttttgaaatttgtcagaaagcaagttactgatttgaagaagggagaacacttgaatggcgaaagacgatgtaattgaagtggaaggtactatagtcgaaacactgccaaacgcgatgttcaaagttgaacttgaaaatggccacactgttttggctcatgtatctggtaaaatccgcatgcacttcattcgcattttacctggagacaaagttacggtagaattatctccatatgacttaactcgtggcaggattacgtaccgttacaaataaagcactccggaaactgaaggaggttggaaacacatgaaagtgagaccatcagttaaaccaatctgcgaaaaatgtaaagttattcgcagaaaaggaaaagtaatggtgatctgtgaaaatccaaagcataaacaaaaacaaggataatttataaggaggtgcccagagaatggctcgtattgctggtgtagatatcccacgtgacaaacgtgttgttatttctttaacatacatcttcggaattggccgcacaacggctcagcaagttttaaaagaagctggagtttcagaagatactcgtgtgcgcgatcttactgaagaagaacttggtaaaatccgtgatattattgacaaactgaaagtagaaggtgaccttcgccgtgaagtttctcttaatatcaaacgtctgatcgaaatcggaagctaccgcggaatccgtcatcgcagaggattacctgttcgcggacaaaactctaaaaacaacgcgcgtactcgtaaaggtccgcgtcgtactgtagctaacaagaaaaaataagtaagggaggttcttaaacaatggctgctgctcgtaaatctaacacgcgtaaacgtcgcgtgaaaaagaatattgagtctggaattgctcatattcgttcaactttcaataacacgatcgttacgatcactgacactcatggtaatgctatttcttggtctagtgccggagctttaggattcagaggttctcgtaaatctactccttttgctgcgcaaatggctgcagaaacagctgctaaaggttcaatcgaacatggtcttaaaactctagaggttactgttaaaggacctggttcaggccgtgaagctgcaatccgtgcacttcaagctgctggactagaagtcactgctatcagagacgtaactcctgttcctcataacggatgccgtccaccaaaacgtcgccgcgtgtaatttgtttgtatagattttgtgtccctgtcaataatgggttatgatacagttatttatgaaacgaatgcaccgactcgttgcctgagcacatacgggactaaacaatggggaatttcggatggaatctcatatgattctattcgaggtttcgacgttttgaaggagggttttaagtaatgatcgagattgaaaaaccaaaaatcgaaacggttgaaatcagcgacgatgccaaatttggtaagtttgtcgtagagccacttgagcgtggatatggtacaactctgggtaactccttacgtcgtatcctcttatcctcactccctggtgccgctgtaacatcaatccagatagatggtgtactgcacgaattctcgacaattgaaggcgttgtggaagatgttacaacgattatcttacacattaaaaagcttgcattgaaaatctactctgatgaagagaagacgctagaaattgatgtacagggtgaaggaactgtaacggcagctgatattacacacgatagtgatgtagagatcttaaatcctgatcttcatatcgcgactcttggtgagaatgcgagtttccgagttcgccttactgctcaaagaggacgtgggtatacgcctgctgacgcaaacaagagagacgatcagccaatcggcgtgattccgatcgattctatctatacgccagtttctcgtgtatcttatcaggtagagaacactcgtgtaggccaagttgcaaactatgataaacttacacttgatgtttggactgatggaagcactggaccgaaagaagcaattgcgcttggttcaaagattttaactgaacaccttaatatattcgttggtttaactgacgaagctcaacatgctgaaatcatggttgaaaaagaagaagatcaaaaagagaaagttcttgaaatgacaattgaagaattggatctttctgttcgttcttacaactgcttaaagcgtgcgggtattaacacggttcaagagcttgcgaacaagacggaagaagatatgatgaaagttcgaaatctaggacgcaaatcacttgaagaagtgaaagcgaaactagaagaacttggactcggacttcgcaaagacgattgactagtttcccttgtgaactaggattttcgtgtgtttattattcagaaacagcattccaataaaggaggggacatcacatgtcatacagaaaactaggacgtacgagtgcacagcgtaaagctatgcttcgtgatcttacaactgatttgatcatcaacgaaagaatcgaaacaactgaaacacgtgcgaaagaacttcgctctgtagttgaaaaaatgatcacgcttggcaaacgcggtgatcttcacgctcgccgtcaagctgctgcatacatccgcaacgaggttgcaaacgaagaaaataatcaagatgcacttcaaaaattattctctgacattgcaactcgttacgaggagcgccaaggtggatacacacgtattatgaagcttggtcctcgccgtggtgacggagcaccaatggcaattatcgaattggtttaatcacatatttttgtgtatctaaagaagggcgggacagtttctaactggatctatgccctttttttagatactgcaacttttaatagagagaaaagcagagcattagctgagaggaggccggttttccatgaatcaaaatcagttgatatcggtagaggatatcgtatttcgatatcggaaggacgcagaaagacgagcactagacggcgtctccctgcaggtgtatgagggtgaatggcttgcaatcgtaggtcataacggttcagggaaatcaacactggcccgggcattgaatggtttaattcttcctgaatcaggcgacattgaggttgccgggattcaattgacagaggaatctgtttgggaagtgcgtaagaagataggtatggtctttcaaaatccggataaccaatttgtcggaacgactgttcgcgatgatgtggcttttggtttagaaaacaatggtgtaccgcgggaagaaatgattgagagagtagactgggcagtaaaacaggtgaatatgcaagattttctcgatcaagagccgcaccatctctccggaggccaaaagcagagagttgcgattgcgggggttattgccgcacgtcctgatattattatcttagatgaagcaacatccatgcttgatccgatcgggcgagaagaagtgcttgaaacggtaagacatttaaaagagcagggcatggcgactgtcatatccattacacatgacctgaatgaggcagcaaaagcagacaggatcattgtcatgaatggcggtaaaaaatatgctgaagggccgcctgaagagatttttaaattgaataaagaacttgttcgaattgggcttgatttacccttctcattccagcttagccagcttttaagagaaaatggactggctttggaagaaaaccatttgactcaggaagggctggtgaaagagctgtggacattacaatcaaagatgtagagcatcgctatcagatgaagaccccgtttgagcgcctagcactgtatgatatcaatgcatcgattaaagaaggaagctacgtagccgttatcgggcatacaggctctggcaagtccactcttctacagcacctaaatggtctcctgaagccgacgaagggacagatatcactaggcagcactgtcattcaggcagggaaaaagaataaagatctgaaaaaacttcgtaaaaaagtcggaatcgttttccaatttcctgagcatcaattattcgaagaaacagttcttaaagatatttcattcggaccgatgaactttggtgttaaaaaagaagatgctgaacaaaaagcgagagagatgctgcagcttgtaggtttatcagaagagcttttggacaggtcaccctttgaattaagcgggggacaaatgcgcagagttgcaattgccggcgtacttgcaatggaccctgaagtgcttgttctggatgaaccgactgcaggattggacccaagagggcgaaaagagattatggacatgttttatgagcttcatcaacgtgggaacttgacgacgatccttgtgacacacagcatggaggatgcagctgcatacgctgatgaaatgattgttatgcataaaggaacgatacaagcatcaggcagtccgcgtgatctgtttttaaagggtgaagagatggccggctgggggctggatcttcctgaaacaataaaattccaaagacaccttgaagctgcactgggtgtgagatttaatgagcctatgctcacaatcgaagatgccgctgccgaaatccgtgctctttttcagggagagaagactttatgatggacagcatgattatcggcaagtatgtaccggggacttcacttgtgcaccggcttgaccccagaacaaaactgatcacgatctttttatttgtctgcattgtattcttagccaataatgttcagacatatgcgttgcttggtttatttacaattggcgtcgtttctttaacaagagttcctttctcttttttaatgaaagggctgaagccaatcatctggattgtcctttttacgttccttcttcacattcttatgacacatgaaggaccgattatctttcaaataggttttttcaaagtctatgagggcggtctggttcaggggatattcatttctcttagattcgtctatttgattttaatcacaaccttattaacgcttacgactacaccgattgagattaccgatggaatggagcagctgctgaacccattgaaaaaattaaagcttcctgttcatgagctggctcttatgatgtcaatttctttacggtttattccgacactgatggaggagacagataagatcatgaaggctcagatggcgcgaggcgttgattttacaagcgggcctgtcaaagaaagagtgaaggctattgtcccgcttcttgtcccgctcttcgtcagcgcatttaaacgcgccgaagagcttgcggtggcaatggaagcaagaggctatcaaggcggagaaggacgtacgaaatatagaaagcttgtatggacaggaaaagacacttctgtcattgtcagcttaattgtattagctgctttgttatttttcttaagggcttagaggtgctgtatgagactgaaatgcacgatttcttatgacggacatttgtttaacggttatcaggttcagccgggcaaaagaacggttcaggatgaactggagaaggctttggctgtcctgcataagtcaaaagacagaattccggtcgtttcgtctggaagaacagacagcggggttcacgcagccggacaggtgattcattttgacactccgctgtctatcccggctgagagatggccatatgccttaaatgcactgcttccggacgatatcgcagtcaaacaggcagaaattgcggatgatgggttccatgcacgatttagcgcagtcaaaaaagaatatcgctactttgtatacacggagaaacacccggacgtatttaaacggcattacgcttaccatttttcatatcgccttaatgtgcaggacatgagagaagcggcaaagcatcttatagggacacatgattttacgagcttttgcgcggctaaaacagaagtgcaggacaaggtaagaacgatatacgaacttgattggactgagacggctgacggcctgcaaatgcggatcacaggcagcggtttcttatataatatggtcagaattattgcgggtactttgcttgatgcaggtattggaaaaatttctcccgatgaggtgaaatccatgctggaagcgaaggatcgcgaagcggcagggcgcacagcgccggggcacgggctatatttatggaacgtttactatgacaactaaaccaggtgtataatattttcttgacagagtctgcataaagttataagatatcatatggtatgtatttcaaccccacgataagccccggaacttattgtgttgtgaaatagaacgtaatcgaagtttattgaaaatgacagatcatttaggagggaaattcaatgcgtacaacacctatggctaacgcaagtactattgaacgcaagtggttagttgttgatgctgctggcaagactttaggtcgtctttcttcagaagttgcagctatccttcgcggaaaacacaaaccaacttacacaccacacgttgatactggagatcatgtgatcatcatcaacgctgaaaaaatcgagttaactggtaaaaagttaactgacaaaatctactaccgtcacactcaacatccaggcggattaaaatcaagaactgctcttgaaatgcgtacaaactaccctgagaaaatgcttgagcttgctatcaaaggcatgcttccaaaaggttctctaggtcgtcaaatgttcaaaaaattgaacgtataccgtggttctgagcatccacacgaagcacaaaaacctgaagtttacgaacttcgcggttaattaaaaaggaggttaccaatttggcacaggttcaatattacggtactggccgtcgtaaaagctctgtagcgcgtgtgcgtttagttccaggagaaggccgtatcgtcgttaataatcgtgaaatcagcgaacatatcccatctgcagctttaatcgaagatatcaaacaaccattaactttgactgaaacagctggcacttatgatgttttagtaaacgtacatggaggcggcctatctggtcaagctggagcaatccgtcacggtatcgctcgtgctttgcttgaagcagatccagaataccgtacaactcttaaacgtgcaggtcttctgactcgtgacgctcgtatgaaagaacgtaaaaaatacggtcttaaaggcgctcgtcgtgcacctcagttctcaaaacgttaattttacgttttcaaaaagctctcgaccttgggttgggagcttttttctttcaataaaacgtggcagtcccgcataaaaataacaactgaatggacgcttgacggggttaagcaaattgtttgtttataaacggtctctttgtaataatcatggtagatttcattcttattcaattggaagttcggtcaatgtttattatcgttatgtgatcagcccagctccatctaaccactgtatctcatccgttaaagttcactgctgattcttaacccggagaaacaatagctctcattgctaatggctttatgtaacgaagtaaaagtaaatctgatgatataaatcacatatctcctttgtgatttttttgcgtttttatgaacttttttctaaatatgcaaagggaaagcgatatcaatctagaaatatttgttatactctatacattaaagtaaggagaagattcatgaatgcgttagtagctcataatagcaaagcctgggataaaaaagtagaaacaggcaatgaatggactgttgctgttgaacagcaggttatcgaacaagcaaaaaaaggcaattgggatataagggtaacaccaatgaaagatgtaccgaaggattggtttccgcctatcaaaggtctgaaagtactctgtttagcatcaggcggcggccagcagggtccagttttggcagccgcaggcgcggatgtcactgtattagataactcagaaaaacagctgaatcaggatagaatgattgctgagcgagatggtctgacgatacacactgtcaaaggaagcatggacgatttaagtgtatttaatgatgaatcatttgatgtcattgtacatcctgttgccaatgtttttgttgagaatgtcctcccggtatggaaggaagcgtaccgtgtgttgaaaaggaacggcattctaatctcgggttttgtcaatcctgttgtatttctgtttgatacagaattagaacagcaaggtgttttaaaagtaaaacactctattccatacgctgacccagaagatcttccgaaacataaagtgaaaaaactgatcgaaaataatgaggctctggaattcggccattccttagaagaccaaatcaaaggccaaattgatgccggttttatcgttactggtttttatgaagataaaggcggttttgtattagaccaatatatccatacatattctgcaacaagaagcgtgaaagtatgaaaagcagcgacctgttagaggggctgcttttttcataaccaattacagaacatttgttcctcaccctgcagaaagctgattttttatcaatgttacaccttcatttgggcgaatttccaaccgaattcgggcattgtttcatcatccaaacctcaaaataatcggtaaaaggagagtgaatttatatggcagaagtactgtcttttatggatgtgaaacgccaaaaggattttgaattagaaaagaacttgctcaaagaactctctctgagacaaattatccagtctgttaaggattgtttggaaccattatttccatttttacatgatgaacgagatattattaccgaaggctgtattgattttgcgattgaagcttatttgttaggcgggcgttttgggatattcggctattacggagaatcaatgcagagtatcagtgcccgctctgcaagagaagaagaagagctgcgtatggagttttttgattatctctataattggatacacgagcaatacgcaacatttgataaaaacactgtttatgaagcggcacgcaagttcattaaagattggtggacagcagggtttgttcaaagagaaaaacagtgtaagcttcgcatgcggtaatcatatttcccgaccctgtcccatagttatgtaataacggacaagcgggaggggaagggatgaggaaaaagcttaaatggctcagttttttgctaggcttcatcatattactatttctgttcaagtatcagttcagcaataacgactcttggaagccgtggagcctgcccttgagcggtaaaatcatttatctagatccaggtcatggcgggcctgacggcggagcagtcggcggaaagctgttagagaaggatgttaccctggaagtggcctttagagtcagggattatcttcaagaacaaggagcgcttgttatcatgaccagagaaagtgatactgatctcgctccagaaggaacaaaaggctatagccgacgaaaagctgaggatctaagacaacgagtcaaattaataaaccattcagaggcggagctctatatcagcattcatcttaatgcgattccgtcacaaaaatggagcggagcccaaagcttttattacgggaaatatgcggaaaatgagaaagtcgcaaaatacattcaggatgagctgagaagaaatctggaaaacacaacccggaaagcaaagcggattcatggtatctacttaatgcaaaacgtcaccaaaccgggggcgcttatagaagtcggatttttatccaatccaagtgaagcaacgttgctcggtaaaccgaaatatcaagacaaggtggcatcttccatatataaaggcattttgcgatatttcacagaaaaaggagaccctccggagtaatggagggttttcttgtggttctaagcataagacacccgccatttatgtatgatataataataattgtaaacgaatacacaaaagggtgaggttcgatgataagagaagatgaagtaagaaaactagtcggagaaatgcgcgaaccttttcttcaaagacctctgggagaattggatgccgttaaggaaattaaaataaagcctgaaaaacggcatatcagtgtaaaagtcgctcttgcaaaaacaggaactgcagaacaaatgcagattcagcaagagatcgtaaacgtattaaaaggggcaggagctgagacagtcggccttcgatttgaagagctgcctgaagaaacggttgctaaattccgggcgccgtcagctgagaaaaaaacattattaaatatggataacccgccagtctttcttgctgtagcaagtggaaaaggcggcgtaggcaagtcaactgtgtcagtaaacctagctatttctctggctcgtctagggaaaaaggttggtttaattgatgcggatatttatgggttcagtgtgccggacatgatgggtatcactgtgcgtccaacaattgaaggagagaaacttcttcctgttgaacgctttggagtaaaggtcatgtcaatgggctttttcgtagaagaaaatgccccggtcgtatggagagggccgatgctcggcaaaatgctgaataattttttccatgaagtagagtggggagaagtagactatatcgttcttgatcttccgcctggtacaggggacgttgctctcgatgtacatacaatgcttccgagctgcaaagaaattatcgtatctacgccacatccgacagctgcttttgtcgcggccagagcgggctctatggcgattaaaaccgatcatgaggtcgtgggtgtcatagagaacatggcttattatgaaagtgcaaagacaggggaaagagaatatgtgtttggaaaaggcggaggagataaactggctgaggaactaaacgtgcctttgctcggcagaatcccattgaaacagcccgattgggataaggaccaatttgctccgtctgtttatgacgaaaatcatccaatcggagaaatatatcaggacatcgcaaaaaaaatagatgcaaaaatgtcagtgcaggtataaaaggtgaaccgggattccagatcccggctttccctttattcactttcttttgctgtgtcttttgctgcttttttcagctcatcttcgaactgctttttgtaaagcggactagaaagtgtttcgttaataacctcttctaaataactgcggaattcttggctttttgccagctggctgtactttttatccatgccgggatcctgcataacgctcatcagcatcttctggtaatctggatccttcatcagctttttaatcactttttcatgctctgtctgaagagttttggcaaagccctcagcaaaatcagtgtcttcaaagatgtttttccaaaattcttcaccttttttagatgtgagtgttttttctattgttcctttaattgcatcttggtcaatcaccagcgcttcattcatggcatcatcatttaataattccttaatagctttctttccatcatcagtttttaatatatcaacaaccatttttttggtctgatcatagtccatatccgctgcttggtcttttggagcgcaagctgttacagataataacaaaaaacagctcatcaatagcgttttggcttttgacatgcttaagctcctttcacatacttgtcttacctttaatatgattcatctgtttggaattatacataacaaaatatcgctgttcgcgatttttgaggggatgaataaagaaatgaaaagccgtggtttagttcgttttttcttttctattttagctgtcggggcgcttatcacgagtattgtgggttttgctttaaagtggggagaatatagagggctgtttctaacatttgaagcgggacagattttctctgttttattttggtttatcggtgtaggcatgattttcagtgtgatcagccaaatgggttttttcgtgtttttaacagttcatcggtttgcgcttgagatattaaggtcctcctctttgtggaatttgctgcagttgtttttcatcctgtttgttgcttttgatttaatgtacgtgcgttttttattttttggagagagcggagaatcgctggctggctatgcgtggttaccggtgtttttattgatctttggagtgattacagcttatataaagcaaaagcagtcctctaagaaaacatttgtgtcatcgttatttttgatggttgtgattaccgcattagaatggttccctgcattaagagtaaatgatgaggactggctttatttaatgctttttccgttaatggcatgtaatgccttccaattgctgatgctgccgaagtttgcagcaaagtaattactttacctctgcggatttggcatcagaatttgcgatgagatcacccacggttacattttttaatcctttttctttcagctgatggatgatatcaggcaatgcttcttctgtttgttttgcagaatcggaggcatgtaaaagaataatgtctccaccggaaacttgcttggtcacattgtcgatgattttttcaactccgggatttgtccagtcttgagagttcacactgtaatgaacgactgtataattgtattgctttgcgacctttagaacattcttattgaattggccggtagggggtcttaatagctgtatgtctttgacccctaacttttcaaaggctgtttgcgcacggttcatgtccttttttatttcgctgctctctaaattggcatagtttttataagcgtagcccatgctcccgatttgatggccgtcctttacgatacgggccactgtgtcgggatggcgttctgcccaagaagcggacaggaaaaacgttgcgtttttaatcccgtttgctttcagagtattaagtatcggttctgctctctcatcaccccagctgatatcgaaagtaagtgaaatatctttagagtctgtttctcctttataaatggctttaggtccggtgtcagttgaaaacacgggaagcgggacagctctttggatataaaaaaagctggcagctgcaaatgcggcgataagtataataattaattgttttacccgtttaatgtgccacacatagaagtgattcactgatgatgcctccttatcttgtccatcattcttgttttacatcttatgagcatggacaattgaatataaccgataaaatgtctcttcacatacagcctaaattgggtgttgaccttttgataatatccgtgatatattattattcgtcgctgataaacagctgacatcaactaaaagcttcattaaatactttgaaaaaagttgttgacttaaaagaagctaaatgttatagtaataaagctgcttcgttaagcggcagtaatgatctttgaaaactaaacaagacaaaacgtacctgttaattcatttttataaatcgcacagcgatgtgcgtagtcagtcaaactactttatcggagagtttgatcctggctcaggacgaacgctggcggcgtgcctaatacatgcaagtcgagcggacagatgggagcttgctccctgatgttagcggcggacgggtgagtaacacgtgggtaacctgcctgtaagactgggataactccgggaaaccggggctaataccggatggttgtttgaaccgcatggttcaaacataaaaggtggcttcggctaccacttacagatggacccgcggcgcattagctagttggtgaggtaatggctcaccaaggcaacgatgcgtagccgacctgagagggtgatcggccacactgggactgagacacggcccagactcctacgggaggcagcagtagggaatcttccgcaatggacgaaagtctgacggagcaacgccgcgtgagtgatgaaggttttcggatcgtaaagctctgttgttagggaagaacaagtaccgttcgaatagggcggtaccttgacggtacctaaccagaaagccacggctaactacgtgccagcagccgcggtaatacgtaggtggcaagcgttgtccggaattattgggcgtaaagggctcgcaggcggtttcttaagtctgatgtgaaagcccccggctcaaccggggagggtcattggaaactggggaacttgagtgcagaagaggagagtggaattccacgtgtagcggtgaaatgcgtagagatgtggaggaacaccagtggcgaaggcgactctctggtctgtaactgacgctgaggagcgaaagcgtggggagcgaacaggattagataccctggtagtccacgccgtaaacgatgagtgctaagtgttagggggtttccgccccttagtgctgcagctaacgcattaagcactccgcctggggagtacggtcgcaagactgaaactcaaaggaattgacgggggcccgcacaagcggtggagcatgtggtttaattcgaagcaacgcgaagaaccttaccaggtcttgacatcctctgacaatcctagagataggacgtccccttcgggggcagagtgacaggtggtgcatggttgtcgtcagctcgtgtcgtgagatgttgggttaagtcccgcaacgagcgcaacccttgatcttagttgccagcattcagttgggcactctaaggtgactgccggtgacaaaccggaggaaggtggggatgacgtcaaatcatcatgccccttatgacctgggctacacacgtgctacaatggacagaacaaagggcagcgaaaccgcgaggttaagccaatcccacaaatctgttctcagttcggatcgcagtctgcaactcgactgcgtgaagctggaatcgctagtaatcgcggatcagcatgccgcggtgaatacgttcccgggccttgtacacaccgcccgtcacaccacgagagtttgtaacacccgaagtcggtgaggtaaccttttaggagccagccgccgaaggtgggacagatgattggggtgaagtcgtaacaaggtagccgtatcggaaggtgcggctggatcacctcctttctaaggatattatacggaatataagaccttgggtcttataaacagaacgttccctgtcttgtttagttttgaaggatcattccttcgaaacgtgttctttgaaaactagataacagtagacatcacattcaagtaatacaagatatcacatagtgattctttttaacggttaagttagaaagggcgcacggtggatgccttggcactaggagccgatgaaggacgggacgaacaccgatatgcttcggggagctgtaagcaagctttgatccggagatttccgaatggggaaacccaccactcgtaatggagtggtatccatatctgaattcataggatatgagaaggcagacccggggaactgaaacatctaagtacccggaggaagagaaagcaaatgcgattccctgagtagcggcgagcgaaacgggattagcccaaaccaagaggcttgcctcttggggttgtaggacactctgtacggagttacaaaggaacgaggtagatgaagaggtctggaaaggcccgccataggaggtaacagccctgtagtcaaaacttcgttctctcctgagtggatcctgagtacggcggaacacgtgaaattccgtcggaatccgggaggaccatctcccaaggctaaatactccctagtgaccgatagtgaaccagtaccgtgagggaaaggtgaaaagcaccccggaaggggagtgaaagagatcctgaaaccgtgtgcctacaagtagtcagagcccgttaacgggtgatggcgtgccttttgtagaatgaaccggcgagttacgatctcgtgcaaggttaagcagaagatgcggagccgcagcgaaagcgagtctgaatagggcgcatgagtacgtggtcgtagacccgaaaccaggtgatctacccatgtccagggtgaagttcaggtaacactgaatggaggcccgaacccacgcacgttgaaaagtgcggggatgaggtgtgggtaggggtgaaatgccaatcgaacctggagatagctggttctctccgaaatagctttagggctagcctcaaggtaagagtcttggaggtagagcactgattggactaggggcccctaccgggttaccgaattcagtcaaactccgaatgccaatgacttatccttgggagtcagactgcgagtgataagatccgtagtcgaaagggaaacagcccagaccgccagctaaggtcccaaagtatacgttaagtggaaaaggatgtggagttgcttagacaaccaggatgttggcttagaagcagccaccatttaaagagtgcgtaatagctcactggtcgagtgactctgcgccgaaaatgtaccggggctaaacgtatcaccgaagctgcggactgttcttcgaacagtggtaggagagcgttctaagggctgtgaagccagaccggaaggactggtggagcgcttagaagtgagaatgccggtatgagtagcgaaagaggggtgagaatcccctccaccgaatgcctaaggtttcctgaggaaggctcgtccgctcagggttagtcgggacctaagccgaggccgaaaggcgtaggcgatggacaacaggttgatattcctgtaccacctcctcaccatttgagcaatggggggacgcaggaggatagggtaagcgcggtattggatatccgcgtccaagcagttaggctgggaaataggcaaatccgtttcccataaggctgagctgtgatggcgagcgaaatatagtagcgaagttcctgattccacactgccaagaaaagcctctagcgaggtgagaggtgcccgtaccgcaaaccgacacaggtaggcgaggagagaatcctaaggtgatcgagagaactctcgttaaggaactcggcaaaatgaccccgtaacttcgggagaaggggtgctctgttagggtgcaagcccgagagagccgcagtgaataggcccaggcgactgtttagcaaaaacacaggtctctgcgaagccgtaaggcgaagtataggggctgacgcctgcccggtgctggaaggttaagaggagcgcttagcgtaagcgaaggtgcgaattgaagccccagtaaacggcggccgtaactataacggtcctaaggtagcgaaattccttgtcgggtaagttccgacccgcacgaaaggcgcaacgatctgggcactgtctcaacgagagactcggtgaaattatagtacctgtgaagatgcaggttacccgcgacaggacggaaagaccccgtggagctttactgcagcctgatattgaatgttggtacagcttgtacaggataggtaggagccttggaaaccggagcgccagcttcggtggaggcatcggtgggatactaccctggctgtattgaccttctaacccgccgcccttatcgggcggggagacagtgtcaggtgggcagtttgactggggcggtcgcctcctaaaaggtaacggaggcgcccaaaggttccctcagaatggttggaaatcattcgcagagtgtaaaggcacaagggagcttgactgcgagacctacaagtcgagcagggacgaaagtcgggcttagtgatccggtggttccgcatggaagggccatcgctcaacggataaaagctaccccggggataacaggcttatctcccccaagagtccacatcgacggggaggtttggcacctcgatgtcggctcatcgcatcctggggctgtagtcggtcccaagggttgggctgttcgcccattaaagcggtacgcgagctgggttcagaacgtcgtgagacagttcggtccctatccgtcgcgggcgcaggaaatttgagaggagctgtccttagtacgagaggaccgggatggacgcaccgctggtgtaccagttgttctgccaagggcatcgctgggtagctatgtgcggacgggataagtgctgaaagcatctaagcatgaagcccccctcaagatgagatttcccattccgcaaggaagtaagatccctgaaagatgatcaggttgataggtctgaggtggaagtgtggcgacacatggagctgacagatactaatcgatcgaggacttaaccatatttttgaatgatgtcacatctgttatctagttttgagagaacactctcaatttgtttggtggcgatagcgaagaggtcacacccgttcccataccgaacacggaagttaagctcttcagcgccgatggtagtcgggggtttccccctgtgagagtaggacgccgccaagcagatttattaattctaccatgtttgtttatgaagctttatattattccgcagtagctcagtggtagagctatcggctgttaaccgatcggtcgtaggttcgaatcctacctgcggagccattgcttccatagctcagcaggtagagcacttccatggtaaggaagaggtcagcggttcgagcccgcttggaagcttaaatgtattattaccaaggtttctcataaggagaaagctttttttattgcgatatgcggaagtagttcagtggtagaacaccaccttgccaaggtgggggtcgcgggttcgaatcccgtcttccgctccatttatcctaacgggatattgtaaattgaattgcgcccgtagctcaattggatagagcgtttgactacggatcaaaaggttaggggttcgactcctctcgggcgcgccatatcttttaatagaatagataggaaatcgggaagtagctcagcttggtagagcacatggtttgggaccatggggtcgcaggttcgaatcctgtcttcccgaccattttttatggggccttagctcagctgggagagcgcctgctttgcacgcaggaggtcagcggttcgatcccgctaggctccaccaaaagtttttaaaaaagttattgactttgaagaagtgacattgtatactaataaagttgctttaacaaagcggacaaacaaaatgatctttgaaaactaaacaagacaaaacgtacctgttaattcagtttttaaaaatcgcacagcgatgtgcgtagtcagtcaaactactttatcggagagtttgatcctggctcaggacgaacgctggcggcgtgcctaatacatgcaagtcgagcggacagatgggagcttgctccctgatgttagcggcggacgggtgagtaacacgtgggtaacctgcctgtaagactgggataactccgggaaaccggggctaataccggatggttgtttgaaccgcatggttcaaacataaaaggtggcttcggctaccacttacagatggacccgcggcgcattagctagttggtgaggtaacggctcaccaaggcaacgatgcgtagccgacctgagagggtgatcggccacactgggactgagacacggcccagactcctacgggaggcagcagtagggaatcttccgcaatggacgaaagtctgacggagcaacgccgcgtgagtgatgaaggttttcggatcgtaaagctctgttgttagggaagaacaagtaccgttcgaatagggcggtaccttgacggtacctaaccagaaagccacggctaactacgtgccagcagccgcggtaatacgtaggtggcaagcgttgtccggaattattgggcgtaaagggctcgcaggcggtttcttaagtctgatgtgaaagcccccggctcaaccggggagggtcattggaaactggggaacttgagtgcagaagaggagagtggaattccacgtgtagcggtgaaatgcgtagagatgtggaggaacaccagtggcgaaggcgactctctggtctgtaactgacgctgaggagcgaaagcgtggggagcgaacaggattagataccctggtagtccacgccgtaaacgatgagtgctaagtgttagggggtttccgccccttagtgctgcagctaacgcattaagcactccgcctggggagtacggtcgcaagactgaaactcaaaggaattgacgggggcccgcacaagcggtggagcatgtggtttaattcgaagcaacgcgaagaaccttaccaggtcttgacatcctctgacaatcctagagataggacgtccccttcgggggcagagtgacaggtggtgcatggttgtcgtcagctcgtgtcgtgagatgttgggttaagtcccgcaacgagcgcaacccttgatcttagttgccagcattcagttgggcactctaaggtgactgccggtgacaaaccggaggaaggtggggatgacgtcaaatcatcatgccccttatgacctgggctacacacgtgctacaatggacagaacaaagggcagcgaaaccgcgaggttaagccaatcccacaaatctgttctcagttcggatcgcagtctgcaactcgactgcgtgaagctggaatcgctagtaatcgcggatcagcatgccgcggtgaatacgttcccgggccttgtacacaccgcccgtcacaccacgagagtttgtaacacccgaagtcggtgaggtaaccttttaggagccagccgccgaaggtgggacagatgattggggtgaagtcgtaacaaggtagccgtatcggaaggtgcggctggatcacctcctttctaaggatattatacggaatataagaccttgggtcttataaacagaacgttccctgtcttgtttagttttgaaggatcattccttcgaaacgtgttctttgaaaactagataacagtagacatcacattcaagtaatacaagatatcacatagtgattctttttaacggttaagttagaaagggcgcacggtggatgccttggcactaggagccgatgaaggacgggacgaacaccgatatgcttcggggagctgtaagcaagctttgatccggagatttccgaatggggaaacccaccactcgtaatggagtggtatccatatctgaattcataggatatgagaaggcagacccggggaactgaaacatctaagtacccggaggaagagaaagcaaatgcgattccctgagtagcggcgagcgaaacgggattagcccaaaccaagaggcttgcctcttggggttgtaggacactctgtacggagttacaaaggaacgaggtagatgaagaggtctggaaaggcccgccataggaggtaacagccctgtagtcaaaacttcgttctctcctgagtggatcctgagtacggcggaacacgtgaaattccgtcggaatccgggaggaccatctcccaaggctaaatactccctagtgaccgatagtgaaccagtaccgtgagggaaaggtgaaaagcaccccggaaggggagtgaaagagatcctgaaaccgtgtgcctacaagtagtcagagcccgttaacgggtgatggcgtgccttttgtagaatgaaccggcgagttacgatctcgtgcaaggttaagcagaagatgcggagccgcagcgaaagcgagtctgaatagggcgcatgagtacgtggtcgtagacccgaaaccaggtgatctacccatgtccagggtgaagttcaggtaacactgaatggaggcccgaacccacgcacgttgaaaagtgcggggatgaggtgtgggtaggggtgaaatgccaatcgaacctggagatagctggttctctccgaaatagctttagggctagcctcaaggtaagagtcttggaggtagagcactgattggactaggggcccctaccgggttaccgaattcagtcaaactccgaatgccaatgacttatccttgggagtcagactgcgagtgataagatccgtagtcgaaagggaaacagcccagaccgccagctaaggtcccaaagtatacgttaagtggaaaaggatgtggagttgcttagacaaccaggatgttggcttagaagcagccaccatttaaagagtgcgtaatagctcactggtcgagtgactctgcgccgaaaatgtaccggggctaaacgtatcaccgaagctgcggactgttcttcgaacagtggtaggagagcgttctaagggctgtgaagccagaccggaaggactggtggagcgcttagaagtgagaatgccggtatgagtagcgaaagaggggtgagaatcccctccaccgaatgcctaaggtttcctgaggaaggctcgtccgctcagggttagtcgggacctaagccgaggccgaaaggcgtaggcgatggacaacaggttgatattcctgtaccacctcctcaccatttgagcaatggggggacgcaggaggatagggtaagcgcggtattggatatccgcgtccaagcagttaggctgggaaataggcaaatccgtttcccataaggctgagctgtgatggcgagcgaaatatagtagcgaagttcctgattccacactgccaagaaaagcctctagcgaggtgagaggtgcccgtaccgcaaaccgacacaggtaggcgaggagagaatcctaaggtgatcgagagaactctcgttaaggaactcggcaaaatgaccccgtaacttcgggagaaggggtgctctgttagggtgcaagcccgagagagccgcagtgaataggcccaggcgactgtttagcaaaaacacaggtctctgcgaagccgtaaggcgaagtataggggctgacgcctgcccggtgctggaaggttaagaggagcgcttagcgtaagcgaaggtgcgaattgaagccccagtaaacggcggccgtaactataacggtcctaaggtagcgaaattccttgtcgggtaagttccgacccgcacgaaaggcgcaacgatctgggcactgtctcaacgagagactcggtgaaattatagtacctgtgaagatgcaggttacccgcgacaggacggaaagaccccgtggagctttactgcagcctgatattgaatgttggtacagcttgtacaggataggtaggagccttggaaaccggagcgccagcttcggtggaggcatcggtgggatactaccctggctgtattgaccttctaacccgccgcccttatcgggcggggagacagtgtcaggtgggcagtttgactggggcggtcgcctcctaaaaggtaacggaggcgcccaaaggttccctcagaatggttggaaatcattcgcagagtgtaaaggcacaagggagcttgactgcgagacctacaagtcgagcagggacgaaagtcgggcttagtgatccggtggttccgcatggaagggccatcgctcaacggataaaagctaccccggggataacaggcttatctcccccaagagtccacatcgacggggaggtttggcacctcgatgtcggctcatcgcatcctggggctgtagtcggtcccaagggttgggctgttcgcccattaaagcggtacgcgagctgggttcagaacgtcgtgagacagttcggtccctatccgtcgcgggcgcaggaaatttgagaggagctgtccttagtacgagaggaccgggatggacgcaccgctggtgtaccagttgttctgccaagggcatcgctgggtagctatgtgcggacgggataagtgctgaaagcatctaagcatgaagcccccctcaagatgagatttcccattccgcaaggaagtaagatccctgaaagatgatcaggttgataggtctgaggtggaagtgtggcgacacatggagctgacagatactaatcgatcgaggacttaaccatatttttgaatgatgtcacacctgttatctagttttgagagaacactctcaatttgtttggtggcgatagcgaagaggtcacacccgttcccataccgaacacggaagttaagctcttcagcgccgatggtagtcgggggtttccccctgtgagagtaggacgccgccaagcaattgcacattagtgtaattttttaaaaaagttattgactttgaagaagtgacattgtatactaataaagttgctttaacaaagcggacaaacaaaatgatctttgaaaactaaacaagacaaaacgtacctgttaattcagtttttaaaaatcgcacagcgatgtgcgtagtcagtcaaactactttatcggagagtttgatcctggctcaggacgaacgctggcggcgtgcctaatacatgcaagtcgagcggacagatgggagcttgctccctgatgttagcggcggacgggtgagtaacacgtgggtaacctgcctgtaagactgggataactccgggaaaccggggctaataccggatggttgtttgaaccgcatggttcaaacataaaaggtggcttcggctaccacttacagatggacccgcggcgcattagctagttggtgaggtaacggctcaccaaggcaacgatgcgtagccgacctgagagggtgatcggccacactgggactgagacacggcccagactcctacgggaggcagcagtagggaatcttccgcaatggacgaaagtctgacggagcaacgccgcgtgagtgatgaaggttttcggatcgtaaagctctgttgttagggaagaacaagtaccgttcgaatagggcggtaccttgacggtacctaaccagaaagccacggctaactacgtgccagcagccgcggtaatacgtaggtggcaagcgttgtccggaattattgggcgtaaagggctcgcaggcggtttcttaagtctgatgtgaaagcccccggctcaaccggggagggtcattggaaactggggaacttgagtgcagaagaggagagtggaattccacgtgtagcggtgaaatgcgtagagatgtggaggaacaccagtggcgaaggcgactctctggtctgtaactgacgctgaggagcgaaagcgtggggagcgaacaggattagataccctggtagtccacgccgtaaacgatgagtgctaagtgttagggggtttccgccccttagtgctgcagctaacgcattaagcactccgcctggggagtacggtcgcaagactgaaactcaaaggaattgacgggggcccgcacaagcggtggagcatgtggtttaattcgaagcaacgcgaagaaccttaccaggtcttgacatcctctgacaatcctagagataggacgtccccttcgggggcagagtgacaggtggtgcatggttgtcgtcagctcgtgtcgtgagatgttgggttaagtcccgcaacgagcgcaacccttgatcttagttgccagcattcagttgggcactctaaggtgactgccggtgacaaaccggaggaaggtggggatgacgtcaaatcatcatgccccttatgacctgggctacacacgtgctacaatggacagaacaaagggcagcgaaaccgcgaggttaagccaatcccacaaatctgttctcagttcggatcgcagtctgcaactcgactgcgtgaagctggaatcgctagtaatcgcggatcagcatgccgcggtgaatacgttcccgggccttgtacacaccgcccgtcacaccacgagagtttgtaacacccgaagtcggtgaggtaaccttttaggagccagccgccgaaggtgggacagatgattggggtgaagtcgtaacaaggtagccgtatcggaaggtgcggctggatcacctcctttctaaggatattatacggaatataagaccttgggtcttataaacagaacgttccctgtcttgtttagttttgaaggatcattccttcgaaacgtgttctttgaaaactagataacagtagacatcacattcaagtaatacaagatatcacatagtgattctttttaacggttaagttagaaagggcgcacggtggatgccttggcactaggagccgatgaaggacgggacgaacaccgatatgcttcggggagctgtaagcaagctttgatccggagatttccgaatggggaaacccaccactcgtaatggagtggtatccatatctgaattcataggatatgagaaggcagacccggggaactgaaacatctaagtacccggaggaagagaaagcaaatgcgattccctgagtagcggcgagcgaaacgggattagcccaaaccaagaggcttgcctcttggggttgtaggacactctgtacggagttacaaaggaacgaggtagatgaagaggtctggaaaggcccgccataggaggtaacagccctgtagtcaaaacttcgttctctcctgagtggatcctgagtacggcggaacacgtgaaattccgtcggaatccgggaggaccatctcccaaggctaaatactccctagtgaccgatagtgaaccagtaccgtgagggaaaggtgaaaagcaccccggaaggggagtgaaagagatcctgaaaccgtgtgcctacaagtagtcagagcccgttaacgggtgatggcgtgccttttgtagaatgaaccggcgagttacgatctcgtgcaaggttaagcagaagatgcggagccgcagcgaaagcgagtctgaatagggcgcatgagtacgtggtcgtagacccgaaaccaggtgatctacccatgtccagggtgaagttcaggtaacactgaatggaggcccgaacccacgcacgttgaaaagtgcggggatgaggtgtgggtaggggtgaaatgccaatcgaacctggagatagctggttctctccgaaatagctttagggctagcctcaaggtaagagtcttggaggtagagcactgattggactaggggcccctaccgggttaccgaattcagtcaaactccgaatgccaatgacttatccttgggagtcagactgcgagtgataagatccgtagtcgaaagggaaacagcccagaccgccagctaaggtcccaaagtatacgttaagtggaaaaggatgtggagttgcttagacaaccaggatgttggcttagaagcagccaccatttaaagagtgcgtaatagctcactggtcgagtgactctgcgccgaaaatgtaccggggctaaacgtatcaccgaagctgcggactgttcttcgaacagtggtaggagagcgttctaagggctgtgaagccagaccggaaggactggtggagcgcttagaagtgagaatgccggtatgagtagcgaaagaggggtgagaatcccctccaccgaatgcctaaggtttcctgaggaaggctcgtccgctcagggttagtcgggacctaagccgaggccgaaaggcgtaggcgatggacaacaggttgatattcctgtaccacctcctcaccatttgagcaatggggggacgcaggaggatagggtaagcgcggtattggatatccgcgtccaagcagttaggctgggaaataggcaaatccgtttcccataaggctgagctgtgatggcgagcgaaatatagtagcgaagttcctgattccacactgccaagaaaagcctctagcgaggtgagaggtgcccgtaccgcaaaccgacacaggtaggcgaggagagaatcctaaggtgatcgagagaactctcgttaaggaactcggcaaaatgaccccgtaacttcgggagaaggggtgctctgttagggtgcaagcccgagagagccgcagtgaataggcccaggcgactgtttagcaaaaacacaggtctctgcgaagccgtaaggcgaagtataggggctgacgcctgcccggtgctggaaggttaagaggagcgcttagcgtaagcgaaggtgcgaattgaagccccagtaaacggcggccgtaactataacggtcctaaggtagcgaaattccttgtcgggtaagttccgacccgcacgaaaggcgcaacgatctgggcactgtctcaacgagagactcggtgaaattatagtacctgtgaagatgcaggttacccgcgacaggacggaaagaccccgtggagctttactgcagcctgatattgaatgttggtacagcttgtacaggataggtaggagccttggaaaccggagcgccagcttcggtggaggcatcggtgggatactaccctggctgtattgaccttctaacccgccgcccttatcgggcggggagacagtgtcaggtgggcagtttgactggggcggtcgcctcctaaaaggtaacggaggcgcccaaaggttccctcagaatggttggaaatcattcgcagagtgtaaaggcacaagggagcttgactgcgagacctacaagtcgagcagggacgaaagtcgggcttagtgatccggtggttccgcatggaagggccatcgctcaacggataaaagctaccccggggataacaggcttatctcccccaagagtccacatcgacggggaggtttggcacctcgatgtcggctcatcgcatcctggggctgtagtcggtcccaagggttgggctgttcgcccattaaagcggtacgcgagctgggttcagaacgtcgtgagacagttcggtccctatccgtcgcgggcgcaggaaatttgagaggagctgtccttagtacgagaggaccgggatggacgcaccgctggtgtaccagttgttctgccaagggcatcgctgggtagctatgtgcggacgggataagtgctgaaagcatctaagcatgaagcccccctcaagatgagatttcccattccgcaaggaagtaagatccctgaaagatgatcaggttgataggtctgaggtggaagtgtggcgacacatggagctgacagatactaatcgatcgaggacttaaccatatttttgaatgatgtcacacctgttatctagttttgagagaacactctcaatttgtttggtggcgatagcgaagaggtcacacccgttcccataccgaacacggaagttaagctcttcagcgccgatggtagtcgggggtttccccctgtgagagtaggacgccgccaagcaagcttaaacccagctcattgagctgggttttttgttttatatctgtgccgatttgctttcgtcagtatccattttatcaagcttctgctttttaaagttttctaatacttttgaattccaatacaatccctagcatgatcaacatgagagtcataaataatcaaaatgcagtttgtacgggagactcatccagactccatccgactgcgattggcaggatagagccgccaatccattggcagcgaacagcatgcttgtcgtttgttctgtttttccatgataaaattgattggtgacaataaaataatggcgaacatgccggccataaataagtcctaagaaaaaactaagaataatccctgcaaaagctgttttattgattgccaaaatacagagttaaatgaggccgctcatatttatcagcctgagataatgatgataggttattttttcggaaaccagctcgggttgccaaatgagagaaaagatattactgtcattaaaacgattcttggtttcatccggatatgataaaatgtctcagactatatttgagccatttttttcttcagcaatcatcttgcgtaattgataaaaatttattatgatactctttgtatgacaactccttgcctcaatacaatatactcaacgtttccccgttttctccggtcgtttttcttttcattttctcccgtaaaataaaaaaagctcccaatacaatagatatggtgcggatttattttttactaaaaaggagtcgttatatttgaataatagttttacattaaaacagcaatggttcgggaatatccgaaaagacattcttgctggcattttagttgcgttagcgttaatacctgaagcgattggcttttctattatagccggtgtggatccgatggtcggtctttatgcgtcattttgcatagccattattatttctatttttggtggcagacctggcatgatttcagctgcgacaggctcaatggcagtcgttatggtgtcgctggttgctgatcatgggcttcagtatttatttgcggctacgattttgacaggcattattcaggtgattttaggtatcagtaaaattgcaagattaatgaaattcatcccgcgttctgtgatgatcgggtttgtgaatgcgctggcgatccttatcttctctgcgcagcttccccagtttgaaggtgcttcttggagcatgtatgcgatgcttgccgggtcgttggttattatttatgtgctgccaaggtttacgactgctgttccgtctccgcttgtggcgattattgtgatgacaattattgcggtcactttccatgtggatgtgcggacggttggtgatatgggcaatatttctagttcattgcctcatttcttaatccctgatgttccgtttacctttgaaacactgcaaattatttttccttattcaattgctttagcgtttgtcgggttgcttgaatctttgctgacagcacagattattgatgaaatgacggatacggatagtgataaaaataaagagagccgcggacagggaattgcgaatatcgtgactggattctttggcggaatggcaggctgcgctatgatcggacaatctgtcattaatacaaaagcgggcggtcgcggacgtttgtcagcatttgttgccggtgcttttctgatgtttttaattgcggtgttaagtcatgtcgtggtgaaaatcccaatggcggcgttagtagctgtaatggttatggtgtctgtcggcacttttgattggtcttctttaaaaggtctcaaaaaagcgccgctcacggactcgattgtcatggttgtgactgtggttacggttgttgtgacggatgacttatctaagggtgtatttgtcggtgttcttttaagtgccgtgttctttgtagcaaaaatctcgaagctgaaaatcgtttctcatgcagaggatcaaaagcttagaacgtatcaagtgaaggggcaaatcttttttgcgtcagtgactgatcttacgaatgcgtttatatatcaagaggatattgagcgggttgtgattgacttaactgaagctcacgtatgggacgattctggtgcggccgcacttgataagattgttgcgaagtttaaggaacaaggcattgaagctgagttaaaaggtttgaataaagcgagtaaatctctaatgaaacagatggcataaaatagagaagcccagatgaatgagatctgggcttttttatataacatacacttaagcagcattgatataatagagagaagagaaattttaaataggggacttgcatatgatgcttcagaagctgaaccgtgtattggggagagtgatgccgctgttaacgccgactagtgtggtgctgggcgtgctgctgtctcagtttttaaatgggtatgaatgggctgtgccttggatctttgcttttattacgtttgcaggcagtttgagcgcgaactttcaatctttgagacatgcattgtctcatcctctccctatgattcttgcactattcgttcttcatattttcatgccgctttttgcttggggcagcggccatcttatatttaaaggtgatcctttgacgattaccggtttaacattggctgttgtgattcctacggggattacaagcttgatttgggcagcgatgtacaaagggaatgtcggtttgacactttcgattattttagttgatactgtgctgtcaccgctaatcgtaccgctgagtctttcattgctggccggcgctcaggttcacatggatgtgtggggaatgatgaaaggtctgattgtaatggtcgtgattccttcttttttgggcatgctgtttaatcagatgtcatctccagaaagaactgcgtttgtgagcagtgcgctgtcgcctttttcaaagctttgcttgatggcagtgattgcgattaacagttcagcgattgctccttatttcaaatccattgatttgagatttgcaggaatagctgtaacggtattctttatcgcgttaacaggttatgccgctgcttggctgatcggaaaaatgatgaaaaggcggcaagaggaaatagtctctcttatatttacgggaggcatgaggaatattagtgccggcgcagttcttgccgttacgttcttcccgtctcaggttgccgttcctgttgtgatcggcatgctgtttcagcagatattggctgctttgtttggctatatgctgaatcgttttgaattaaaaccaatgttgcagaaggcataaaaaaaccgctcatagggttgagcggttttttccgtatagccattcgagcgcgttgatgaactgtttgcagaaatacttgtggtggtgcaccgctcctttttcaattgaaagacacaactggtcttcagtgaagcctttttcttttagactttgatgaacttgctttgtttttttcagcatatgtcgctgaatggattgtttttcacggccttcttcactcccgatagacatgaaaacacgtgcagtgccgggctttaaagaagatatatgaatggtttccgctgcgttctcgtaccagtatgaacctgatatagagcctattttcccgaacattgacggatattttaatatggcgaacattgagatgaggccgcctaatgaggcaccgatcattcctcttgactgcggttccctggtgacgttccagttttcttcgattagcggaatgaactggttcgttatatcagacagatagtgatatcccattccgccgaagtccgtgaaccgatcactgagtgatgcagccggccatggggtgtattcatcaagccggttttcgggttcgataccgatcagcacgagttcagggagcctttgctgttgaaaggcgctttctagtaattcgatttggttttggaacaaagaactgccatcctgcacgtaaacagcaggaaatcccccgctgtctgtgctgtaggaaggagggaggtacagcgtgaacctcctgttgccggctttgtgttctgaaagagatcctttcaagcattctccccctttttttgcttgaaaagcagatataagaaataaggaactccgaggatcgccaaaatgatgcctgcgggcacttctgcgggctgaaaaaacagttttccggcaaagtctgcgcttatcacaagaagcatcccgattaaaccgctcagtggcaggatatagcgatgttcgacgccagccagtctccgtgagatatggggagcaattaagccgacaaacgccatacttcccgctacggagacacaggcgctgatgattgctacacaggcaacgagaaggatggttttttctttatttgatgaaataccgaggcttctgactgtgtcttcatcaaaacgaatggtgtcgagcaggcgggatttgccgataagaatcggtataaacagcagcatccatgggagtacagctgtaatatacgtccagttggcagaccagatgcttccgtttttccacaccatggccatttgatagtcttgcgggtccatttttaaagataaaaacaaagacagggcgctgaatcctgaattgatcgcaatccctaccaaaataattcttcctgaatctaaattgcctctgtgccatgcaaatatgtaaatcaggatcgccgcgatgagcccgcctatcaatccaaagagcggcattcccatcgctgcagctatggatgtcacttccttctggccttggaataagagcataaacgctacaatgccagctcctgcccctgcgttgattccgagaattccagggtcagcaagcccgtttctcgtgatggcctggataacagcgcctgcaatgccaagaccgagtccaataatagcagccatgacaacccgcggcagtcttaaatcgaacagcaaaatttcatactgcggattcgggtcgatttgaaaaagagtggagagcagctcagcaggacgaacagaaaatgatccgctcgttaagctgaaatagctgacaacaagaatcaaagcgatgaacaatgcatattttttagccattttgctcccctccttttcgtttaattaaataaaggaagaaaggtacgccgataatggatgttacgacctcaatcggtgtttcaaacggatagttgataaatctgcttgcgagatcacacagggttaaaaagattccgcccaaaatacaggaacacggaatcagcctgctgtaatcagagccgacgagaaatctcgtgatatgcggaacaaccaacccgacaaacgcaatttttccggccagcgctacggcactgccggttagaatgatgacggaaagcatcgccatgattttaatggtttttttcttttgccccaggcttttagaaatgtcgtcccctaatgatacagcggttacctttttgctgagagaaatggccattataatgccaatcaggaaaaacggagcggcaagcttcaggaaatctggactcatttgatgaagtctggcactgtaccagaaactgagatcctgagaaatttgaaaataaatcgacatggccgctgataagctgctgagcagcatgcttgtgactgtgccgatgatggcgagctgcacgggggtaaatccgtttggcatcatggcggcaaggccgaatactaacaccgctcctaacgctgagccgataaaagagtatatcatcatttcaatcgaagatgattgcgggagcagaaccatgcaaagcgtaatgataaacgctgaaccatctgaaacacccataatggatggcgaagctaaataattgcgcgtaatgccctgcataagcgctccagaaacagcaagggctgcccctatgagcagagcgccggcagcccttggaatccgggaatgccatataatttgatggtctgtgtttcccggatcgaaatgaataagagatgtaaaaacaatatctgtgctgagatgctttgccccataaaggattgaaagcaaaagtgacagcgctatagcaaatggagaagtaatcaatatgatacgtgtccactgttttgaatacatacaaaaacctactctgaattagttttgtgtcaatttttcagcagccgctttcaggaaacggactttgctccaagctgtgccgccttgtgcgagagggtccactgagttgacatacacatggtcttctttgactgctttaaggcttttccagattggatttttctctaaatcttttaaggcatcaggtttgtctgcattttcatcatcagaaaattggacgaaaatatggtccgggttcatttcacttaatttttctaatgaactcagctcttgcgcttttgcagcctttacttcgttcggcgccttaaggcctaaatcaccgtatagtgtggagttgaaatacacctgttcagggtaaatgtaaatgttgccttgtctgattctgatgacaagcgcttttgaatctttcgctttatcgttgatttttgtttttatttcttttagatcctgttcatagtctgcaataattttctttgcttttttctcttttccagtcagctgggcaagaagcatcatgttttccttccagtttgaagagatatgagaaactgggatcgtcgtgcctgctgtgctgattttttgcagcgttttttccggaaactttgttgaagcaaggataacatctggcttcatttcaagaatcttttcaatatttggctccattttttctccggttggttcggctttatcagtgatgtctttgaacatatcagggaatttgccggagaatgaaattgcgccttgcggatgaacgtcaagcaatttcgcgtcttccattgattcaacgcttcccgtaatggcaattttgtctgtcggtacagttacttcatatgttttatcaaggtattcaattttcttcttctcagatgctgtgccgcttgccttgctggcagttgattcatttttgctgccgcaagctgccgccgtcagcgcgagaagtaagattaataaggtaagagatatctttttcatctatagagcctcctgttcaattgataactattatcaattggaattatagagaatgaacagatataacaccatggacaaattcctgatttatcatggacaatctccggatagtaaagaaacagtttgctgaacgatgcgttcgtgcccgcaagctgagtattcattccacgggtcaagggatagaagataaacacggttatctcgtaccgcgcttaggttttgccatgcttctgtctgctgtaattgctggtagtaagctatggtctccggctctttaaaaagaaaaagcatcatacagtcagcttggtaatttgcgatattttctaacgaaatcgcttgttctgaaggtgtgtcagccgttgttgccgagctgaatcctaaatccccaaagaaaacttcgcggacacttcggttatgagccagatagaagttttgcttatgcagcctcaaaaagagaaaacgcagcccttgaacgtgctgaagtgtttttttggcggccgttgtctgctggtcataatccgctagccacttttctgcttcggactcctcctttaaaaatgaggcagtttgcagaaagtgggttctccagctttcttctgaaggaaggtacatgacttctgcgatgcgattcaggcgatcttgttcttctggagaaatagaatccatgctgacaatcacatctggttctgcctgtgataacgtgtacaggttttcttcccacttttcattaaaccggtatgcactgagctggacgggtatatctgtcgaataatgctgatagtagtaagacgtccatttcggatgcagagcggccgcaaaaggtatgtggtgaagagggatgagatggcccattgtgccccttccgtatgcggcgattttctttcggcgttttttcatatagcttgtaggtgaacagcctgtatattttttaaagattctgctgaaataaaattcatcttgataaccggtttggtgtgcgatttctttcaatttgcagtttgattttgccatgagccgttttgcctttgtgattcgtgttttcgtaataaattctgttacgctctgtcctgtccattttttaaagctttcactgtagtgtttggcactgattcctgccatttgcgacagctgggcaagcgtgatttttgtatcggcatgggtttcgatatagtgttttgttttttcgattgctgaatgtgtatccgtttgatcagataaactggcagtaaaaagatcataaatcaggctttgtacttcaatcacacattttagctgagaaagctgagacgattcattccatagtgcggcaagctcttgaagccggactgcaagattttcgatatgtgaaacattcataagcttcagtttggctaattccgattctgtgcacggtgtgaaaatatcttgcccggtttccttgatatagcttagaagcctgattatacaggcatctatatgtccatcggctgctggcgtaaagccaaaggtctcgttaggcggacaaacataaagtgtctttttttgcagaggattggtgtttgttccgatcgaaatatagccgtttccttttaaatgaaaaatcagcacgaatgaatcggctaattgctgttctgagaagagatcacttgtcttttttagatattcaatttgtactggttgataaatcactgcattttgcacgagtagaccaccttttcagaagctttcaattgataatcattttcaataaaaattgtaccaaataaatgaaagttttcctatataaagcgggtgggtttttagcatgaaaaaaacccttacttatgtgtaaaagtaagggtctttcgttcaataagaatatgttacacgtgtaacatacgatgcttatgttctaataaatgagatacttttttcttgttttgctgaattgttggagtgttttttcatagctgtttatgatgttctcaaccgaagttccattttcaatttttgtcctgatccagccgttgcctgccagtttatcgaatgaacctgttgacaggaactcaaaatcctcaggatagagatcgtgtatggttttaatgactgaaagacccgttttaacggcttcaaacttatctctgtctgtcacatagagctgcacaccgtggcaaagcgttccttgatgtttagaaaacgtcggtgtgaaggatgctgccctaaatgtaacgcccggcaaatggaggctgtttaatgtttcttcaagttctgtgcttttgataaagggagctccgatcaattcgaatggctttgttgtccctcgcccttcggatatatttgttccttcaatcagcccggttgcaggataaacaaatgtgctttccaccgtcggcatgttaggcgaagggaggacgaaaggcaatcgggtatcgtcaaaatccatttttcgtttccagtgtttcatttttaccactgtaagatcggcatcaatactaaattctttgttgaacagtgaagccaattcgcctatcgtcatcccatgcttcaatggaatgggatacaatccgacaaatgaggcgtattcaggttctaagattggtccttcaatatgattcccgccttgaggattcggacggtccagcaccataaatggaatgccgttttctttagcggcttccattgcgtatgccattgtataaatgtacgtgtagaaacgggtcccgacatcctgaatgtcaaacattagaatatcgacatttttaagcatttctggagtcggttttttcgtttttccgtagaggctgtatacgggaaccccggttttttcgtcaatgtaagagcctacttcgtctccagcctgggcgtcaccgcggacgccgtgttcagggccgaataaagctgtcagtttgatatccgggttctcgtaaaggatatcgacactgctttttagagatgtgtttactccggctggattggtgatcagtccgatgcgttttcccttgagctgttttttatagtctggcaagagcgtgtctatcccagtctggactttaggttttttagctgtttgattctttgaatcgggtgaagcagaggcagcggttatcgttccgaacatcatgagccctgtcagaaaagcgaatattgtttttctcatgtgtccctccttattaaagcggtcttcccgttttgatatttaatccgtagccaagtgggtaaagggtgttccctggtttcgtgactgacggaatgtcaactggaagtgtgcctttaggttttgcctggccgaatatcgccatcactccggccggaatattaggttgaagataacggccatttgcgtatcctttaaagccatagactgcaatcagtgcttttgcttcttcgaaattggctgcgtcataggggttgcgcaggctcattaagacaaatggtttgttgtgctgcagtgcggctttcatgacagctctcggaaacacggtggcccatttgcttgaatctgatattgtgtcgtcgatgacaccgtcgttgacgacagggtcatttttgacgacataggagccggtaatgatataatcagcctcttttacttgtttttcatgctcggtcttaaatacttggctggcaaagttcattttgctgagggatacgggtttgattttctttcgcttgatgagatcgtgaatggtttgttcgattgaagcagtttgttcttcgtaaggtgccacaattaagattcggctgccttttttaggcttgaacggcaaagtgtgctgttcattttttaatacagttactgctttttcagctaattttttctctgctttcaggtgctgcttgcttcctacgatttttttggctttggctattttttcttttgtactgtcgctgtttcgcgctggatacatgccgcgttttattttcagggaaatgattctttcaactgaattgttgatttgttgttcaggaatatccccgtttttcacggcttctttcaaagcttgaataacacgtgcgaatttctgttcttctttcaatgaagtgactgaggctggcattaatgcaatatcgacaccagcttttacggccatgaccacagcctcttcctgtccgaaatgatctgcgattgccttcatattgagcgcatcggtaacgatgaccccattaaagcccatttcctgacgaagaagacctgtcatcactttttttgaaagtgtagctggaaccagaatgtccgatccatcgagtttgcttttgtaagtggtgtcatcaaaggcgggaaactgaacatgggctgtcatcaccatatcagcaccagcatcaattgctttttgaaaaggataaagctcgacctcacgaagccgttcttggccatgggaaacgagcggcagtccataatggctgtcaacgtccgtgtctccatgtcccgggaaatgtttgagggcagacgcgatatcctgccgctgcaaccctttcatcgtatataaaccgaggcgtgatgtcagttctcgattggagctgaatgaccgtacgccgattacaggattatcaggattattgttaatgtccacgacagggctgaaatctgtattgatgcctaaggcagagagctcttttccgatgatgctgccggtctgatacgcattgattctgcttctggctgcgcccagcgccatattccctgggaaattagtgccctcccctaacctcgttacaatgccgccttcctgatcaatactcagcatgagcgggatttttggacttgccttttggtaatcgtctgtcagttggacagtttgttttgttgtttttacattttctgcaaaaaggatgatgcctccgaattgatatttcttgacgaggctggcgacttcatcattcatttttgtaagggcttgcggagaggactcgccttccttttgccaatttctaaaatcaggcatcagcatctggccgagtttttcatctaacgacatacgattgacaatctgattggcatcgattgcacgtttggatgcagaggcttctgtctgtctggccccgaaaaagcatgaaagaaagagaacggctgaaaggataagcggaaagacaggtctcatagaaacttcctcctatcgtctaatcattcactccatcgcttcataaatcgcggttatgacacttccataactgcctgttggaaattggtcaccttcaaagacgttcggattttcttccggatcaataactggtgtatgctttttatttgttaacaatgcgatgcctaaattgtatgctggatcaataattgtaactgtccccgtccagccggtatgcccgtaagcattttcgctggcatgagggccaaacatccattccatgcttttacttccgttccgcctccagccaagagcgaatgtcggatctgttgctgaaggtgctgtaaacaggtcggctgttttctgatcaaataaagaaatgtttcggtatgaacctttgtttaacatgacttgcagcagtatggccatatcatctgcatttgagaacaatccggcatgcccagacacgccgtccattgagtaaaacgctttttcgtcatgcacctctccttgcagcgtgtttgtgcggatgttagggaattgaataacgccgtcacgtgtattgcccatgcgttcagtagctgcgaactgtttcggtttaaagcccttttgcagcggattgtacaaggtatgcttcagcctgagcggtttgtagagctcttgctccgtgtagacatcaagcggtttgccggtgagtttttcgacaatacatccgagtagcatatatccaatgtcactgtatacgtgttttgtcccggtttgataatcgagcggaattttcgtcaaatattcaatcgttttgtcccgttcttgggaatagtacttgccggctttttccggcgtgtaaaagtaaaagcttgatgggagccctgattggtgctggaggacatcaatgacacgtatcttgtcttttccttttatgaggtcacccggctgatccttgaaacccggcaaatatgcagaaactttttcatagacgtcaagttttccttggctgactaagcgctgcaatgcaaaatttgttgcgtacatttttgtatttgaggctaagtcaaacatcgtgcgggttttcattttggccggacggcgcagcagttctgatccttcgtactttttactgtagccgtatgctgctttttttatgatgcgtccatccttcaccaccacaagaacggcgcctggaaatcctgctgcaatatcccgttctatcatctgatctaccttccttagcttcttcgtcgagaattgtgcagtttctgcatttatgattttcggctcaatcaagttgcctgctgtttgtgcgaaggtttcatttggcgcaaatatcgatagggttaaaatggcactgaatatgaacagtgtctttgttttcacaggctagcccctttctgtgcttctatcccgtttactatccctaaaacagaaacaatttaatcgaactgagaagccatttcatctttatatccgaatgcataggtcaataaaaaaccggccgcgtaggaaataaagagcccaacgatatacaggatgatttgcgaaggcaggactagaaaagatagcggcagtccggagacaccaatcgcaatggtggctacttgaaaataagcttgaaaggcgccgccgattccagctcctaaacatgctgttaaaaacggacggccaagcggcagcgtgactccgaaaataagcggttcaccaatgccgagcagtcccgatggaagcccgccggcgattgctttcctcagtgttgtttttttcgtcttcacgaaaacggcaaaggccgcgcctacctgtcctgcacctcccatagccaaaatagggagcagaggatcattgccaattgaattgatcagttccatgtgcacaggcgtcaagccttgatgcagtccggttacgacgagaggaaggaaggttgcgcccagaataaagcccgcagcgatgccgccgatgtccaggatggacagtaggccggatgtaatagcatcagaaatgaatccgcctaaaggcataaatacgacatacgttacgattccggtgattaacagtgaaacggtgggtgtgacaatgatatcaagtgattgaggaataaaacggcgaataaattgttcggtgtaagcaatgaatatggctgcgaaaaggacgccgatcagacctcccctgcccgggagaagctcttctccaaataaactgatttttgcgatctccggattgataatcaagatcccggccaaagccccaagtgcgggtgtcccgccaaattctttcgaagcgttaataccgacgagaatgccgagataagtgaacagccctgatccgatgactgtcaggataatcgcaatttgtgagtctgcagagagccagcctgcttgaataattgctttggtaatcccagtaattaaaccggaagcgactagagcgggaataagagggataaaaatgctggcaattttacgtaagaaaagtttaaaaggagtggcatttttccgattgatatcggctttctttttggccgctgcttctttgacatcggcaccttcttctgctgacacgagctttgagaaagcagctgtaacatgattgacaactcctgtgccgaggataatttgtaaggtttcagcttcaacgacccccaatacgccgtcaagctttcttaaagcctgagcatccgctttgctttcatcgtaaggcgtaatgcgcaggcgtgtcatgcaatgcgtatatgaagaaatattggattttcctccgcatagctcaaggattttctgtgcgagatgatggtagttattttctttgctcattaaaacccctccccttcaagatgccttattttattctcatagattgtatggctgctctcgttttatctatataaccggttgtcgtttcatactgctcagccgccatgcctaaaaacaaaacatcaattataaaaagctgggcgaggcgggaagaagtggctgcacttcgaatcaaggcttcattggaatgggctgtatacaaagggacatcagccagtgcggagacggatgtctgactgaattgtgtgaggctgatcgttgtgatgcctttttccttagccatggcgaacagttcaacgatttcctgtgtctctcctgaaaacgaaatggcgaatacgatgtcgtctttatctgcatttgcgattaaagatgccacaagatgagtgtctgtaaacgcggttgcttgtttatgaatgcgaagccacttttgctgggcgtccttggcgacaatgccggaagccccgaggccgataaaatgcacggtatgagctttgagaagcagagaaaccgctcgttcaagctctttgtagtccatcaggtctgaagtatcctgaatggcttgaatggcattgccggccgttttttcggaaatggagggcagcggctcgtggggaacaatatcccggtagccctgaaacgtaggctttgccagatcgcctgctactctcatttttaaatcttgaaatccttttaaaccgagtgatttgcagagcctgatgacggcagcgtcacttgaattggctaaggcgctgatttcgttgaccgtgctttcgattgctttgtggggatgggctaggatataatctgcaagtttgcgctcggatggagggagcttatgcttcattgattggatgatcgctaaaccgcctgtggccattctagttctctccttatcatggatggtaatgttcgattgctttgtcaatgaaaccgtttgcttcatcgagtaatgtctgtgcttgtttctgatctgtgcttgttttgagcatgacgattgctgttttgacgtgatgatcggcttgttccagagtgtatctggctgtgtcgtatgaagcgtttgtaaggctttggatgatgctgatggcgcgttcttttagttttttgttgctgacgttgacgtctaccatcaagttttcgtaaaccttgccgattttgaccattacagcggtagatatcatgtttagaatcattttatgagcggttgcggctttcatacgtgttgatcctgtaatggcctcaggtccgacgacaacctcaatgctgtgatccgcatccttgctgatggcggaattttcattgcaagtaagggcgatggtgtgtgctccgactttacgggcgtatcttagggcgcctgcggcgtagggtgtgcggccgcttgctgcgatggcaatgacggtgtcatttgaagtgagctgtatgtttcttaaatcttcagctcctgcttcttcactgtcttcaatgccctctgctgcctgtaaaaaggcttcggggcctccagccatgattccgatgacctgatctgggcttacgctgtaggtgggaggacattcaacagcatccatgacgccgagtctgccgcttgtgccggcgcctgtatatatgagccggcctccattttgaaacgattcatatgcgcagtctacagctgttttgatgtcggggagaacctcctgaacggctgcagcgactttcatatcttcgttgttgatcattttaaggatgccgagagtgtttgctttgtggatttcaactgtttgactattgcgtgattccgttgtaagacggtgaaggtttaatggttctgacatgaggatgccccctgttttaaaatgatatatctcaatattcagtatattcatttctgttatgatatttcaactatgtttttaaatttttgaaattttatttcacttaagactataagaaatgatgaaggatcaactgttctccaagcggcccgattcttcgccgtcctttatcaaggaacccgcttttcatataaaggtgttttgcgcgtatgttcagatgattgacggccaagatgatttcgtcgcaccatggaaaatatccgctcacaaaagcgggaagcaaaagcatggcttttttcgcatagccttttccgtgatgcacagcggttaaagacagggagctgagcagtaaagcaaatggattgttagaataggaagcaagcgtttcttttgatgcatgtaaaatgaaaaaaccgactggaaggtcgtcttttaagatgacaaccgggtatcggtcctgtatgcccagagcctgagacagcacctctttcgggagggaggtaaagcgtttgtcatcgttggtgagcgtgaatgattggagctcgggcaagtgttcaggcttatagaaggataaagaaatgtcttgagtcatggggtggcctccttacaatatgtcgttaagctcgttttccgaaatgacgcggtagcccgcttgttttaacagtgcggcggttactccgctgccggtgatttttttgccagagaatgtgccgttatagataaaaccgcttccgcaagatggactgttttcttttaatatgacggcagaagcgttgatttcttttgcgtaagccaatgttttcgcggcgccttccatatatagttctgtgacgtcttctcctgaagctgtcacgattttcgctgttccattgaggacatcctcgccagtgcctcctatgatttctgcgggttcgcgtggggtagagaagccgccgagaagttcagggcaagccatgactgctttcttttcatcgactagttttctgattttctccgacgctgcgtgagagccgttatatctgcattcaatgcctccaaggcaagaactgactagaatcatattggtttctcctctcttgctttgcttgtctctatcataaaataaatggctttagttgggaggctttttcagttaaaaaaggagttaaaaagtttgaaaataaaaaatttaattttcctctttacaaacagggggtgacctgtatataataacttttgtcagctcgacgagaacacaacggcccgttggtcaagcggttaagacaccgccctttcacggcggtaacacgggttcgaatcccgtacgggtcaccatttggaggattagctcagctgggagagcatctgccttacaagcagagggtcggcggttcgagcccgtcatcctccaccatcttgccggtgtagctcaattggtagagcaactgacttgtaatcagtaggttgggggttcaagtcctcttgccggcactgttttttcaaaattttatgtggaggggtagcgaagtggctaaacgcggcggactgtaaatccgctccctcagggttcggcagttcgaatctgcccccctccaccattattgggctatagccaagcggtaaggcaacggactttgactccgtcatgcgttggttcgaatccagctagcccagtcacagacacctttgatcaaaaggtgtcttttttcttttcggaaaaatcattccaacttctaactgttcagtctgtataataattttaaaaatatgttaaggtagtttattcacgaattaccatctacaccctgccaaaaatttgataaacttattttataaaaaaattgaaaccttttgaaacgaagctcgtatacatacagaccggtgaaggcagaggttagataaatatggaaatgatgattaaaaaaagaattaaacaagtcaaaaaaggcgaccaggatgcatttgcggacatcgtagatatttacaaagataaaatttatcagctttgctaccgtatgcttggcaatgtgcatgaggcggaggatattgcacaggaagctttcatcagagcgtacgttaatatcgacagttttgatattaaccggaaattttcaacttggctttatcgaatcgcgaccaatttgaccattgaccgcattcgcaaaaagaagccggattattacctcgacgcagaggtggctggtacggaaggcttgaccatgtattctcaaatcgtcgcagatggtgttttgcctgaagatgcagttgtatcgctggagctctcaaacacgatacagcagaaaattttaaagcttcctgacaaatacagaacagtcatcgtattaaagtatattgacgaactctcattaattgaaatcggggagattctaaacattcctgtggggactgtgaaaacgcggattcacagaggcagagaggctcttagaaaacaattaagggatctttaagtggggtgatgaaatgagctgtcctgaacaaattgtgcagcttatgcatatgcatcttgatggagatatccttccaaaagatgaacacgtattaaatgaacatctggagacatgcgagaaatgcagaaagcatttttacgagatggagaaatccatagcgctcgtacggagcacatcgcatgtcgaagcccccgcggattttaccgctaatgtcatggcaaaattgcctaaggagaagaaaagagcttctgtaaaaagatggttcagaacccatcccgttatcgcagctgctgcggtattcatcattttgatgggcgggggtttttttaacagctggcataatgaccacaatttcagcgtgtccaagcagccgaatcttgtggttcataaccatactgtgaccgtgccagaaggtgagacggtcaaaggtgatgtcactgtcaaaaacggcaagctgattattaaaggcaaaatagacggggatgtaaccgtcgtaaacggcgaaaagtatatggcctctgctggacaagtcaccggtcagattgaagaaatcaatcagttattcgactggacatggtacaagatgaagtctgcggggaaaagtgtactcgatgcattcaatccgaacggagaagagtaaagcgcgttagccgctttgctctttttttgcgggctgagagggctggcacatttcacttgctaaatcgaaatgtggtataatgggctcgctatgtaaagtacatatgcgtaacacgtaaaacacaaaatacgaaatgactgaaatcttggaggacgaggaaatggcttttgaggatatcccttttttgcagtacctcggcaatgccgttgatattctccttgtttggtatgtgatatataaattgattatggtgatacgcggcacgaaagcggttcagctgttaaaaggaattgtagtcatcgtgcttgttcgtatggccagccaatatttgggcctcagcacacttcaatggctgatggaccaagcgataacatggggatttttagcaattattattatttttcagcctgagctgagaagagcgcttgaacagctaggccgcggccgctttttttcgaggagcggcacgcctgttgaagaagcgcagcagaaaacgattgaggccattacaaaagcaatcaattatatggcgaaacgccgtataggcgccctgctgaccattgagcgggatactggaatgggcgattatattgagaccggcataccactaaatgccaaagtcagctctgagctgctgatcaatatttttattccaaacaccccgcttcatgacggtgcggtaattatgaaaaataatgaaattgccgcggccgcctgttatctgccgctttctgagagcccgtttatttcaaaagaactgggcacgcggcacagagcagctgtcggtatcagtgaagtaacagacagtttgacgattattgtgtctgaagagaccggcggcgtcagtgtggcaaagaacggcgaccttcacagagagcttacagaagaagcgctgaaagaaatgcttgaagccgagtttaagaaaaacaccagagacacttcttctaaccgctggtattggaggggcaagaaaaatggataaattcttaaacaaccgctgggctgtgaaaattattgctctgcttttcgcgctcttgctttatgtggcggttaacagcaaccaagcaccgactccaaaaaaaccgggtgaatctttctttccgacatcaacaactgatgaagcaactctgactgatattccggttaaagcgtattatgatgatgaaaattacgtcgtgacgggtgttccgcaaacggttaatgtcacgataaaaggctcgacaagcgccgtgaaaaaggctcggcagaccaaaaactttgaaatatatgccgatatggaacatttgaaaaccggcacacataaggttgagcttaaggccaaaaacgtgtcggatgggctgacaatctcaattaatccgtctgttacgacagtgaccattcaggaacggacgaccaaaagttttcccgtagaagtggagtactacaacaaaagcaagatgaaaaaaggctattctccggagcagccgattgtcagtccgaaaaatgtgcagattaccggatcgaaaaatgtgatcgataatatttctcttgtaaaagcttcagtgaatttggaaaacgcagatgaaacgattgaaaaggaagcgaaagtgactgtctatgataaagacggaaacgcgcttcctgtcgacgtggagccctcggtcatcaagattaccgttccggtgacaagcccgagtaaaaaagtgccctttaaaattgaacggacaggaagccttcctgacggtgtcagcatagcgaatattgaatccagccccagtgaggtaacggtttacggctcacaggatgtgttggattctcttgaatttattgacggcgtcagcctagatttaagtaaaattaacaaggattccgatatcgaggcagatattccgcttcctgacggtgtcaaaaaaatctcaccgtcaaaggtgactttgcatatagaagtcgatagtgaagcggatcagaagttcgagaatgtccctatcaagactgtagggctgagcagctcacaaaacattgaatttcttgatcctgaatcacaagcgatagatgtaacggctaaaggctctcccacgaatataaataaactgaaaaaatcagatattgaattgtatgtgaatgtttcagatttagaggacggggagcatagcgtgaagcttgaagtgaacgggccacagaatgtaacttggtccttggggcggaaaaacgccaaaatcaagctgacgtctaagaaaagcaatacatcaacgaatgataacagcagcaatacatcagggaaccaggacacagataaacaaacaaatgatcaaaagaacaatcagcaagaagatacaaagaacactgataaaaacaacaacgatcaaaaccaagacggaaataaagatcaaaaccaagatcaggatgaggatgaatccactgcgaattcacaatcctcatcggaataaaaaaggagcgattataaaatgggcaagtattttggaacagacggtgtaagaggtgtcgccaatagtgagcttacacctgagctggcctttaaagtcggacgtttcggcggttatgtgctgacaaaagacaaacaacgtccaaaagtgctgataggccgcgatacacgcatctccggccatatgctggagggagcccttgtcgccggacttttatccattggcgcagaagtcatgcgcctgggtgtcatttctacaccaggtgtatcttatttgacaaaagcgatggatgcagaggcgggcgtcatgatttccgcttctcataacccagtgcaggataacggcatcaaattctttgggggagatggatttaagctttctgatgaacaggaggctgaaattgagcgcctgatggacgaacctgaggataagctgccaagacctgtcggagcagaccttggacttgtaaacgattattttgaaggcggacaaaaatatctgcaattcttaaaacagacagctgatgaagatttcacaggcattcatgtggcattggactgtgccaatggcgcaacgtcatccttggcgacacacctgtttgctgatttagatgcagatgtttctacaatggggacttccccgaacggattaaacattaatgacggcgtcggttcgactcatcccgaagcgctcagcgcgtttgtcaaagagaaaaacgcggatctcggtcttgcgttcgacggtgacggcgaccgcctgattgctgtcgatgaaaaaggaaatattgtagacggcgaccaaatcatgtacatatgctcaaaacatctgaaatcagagggccgtttaaaggatgatacagtggtttcaaccgtgatgagcaacctcggcttctataaggcgctcgaaaaagaaggcatcaaaagcgtgcagacagctgtcggcgaccgctacgtagtagaagcaatgaaaaaagacggctacaacgtcggcggagagcagtcaggacatcttattttccttgattacaacacgacaggggacggattattgtctgctattatgctgatgaacactttaaaagcaacaggcaagccgctgtcagagcttgcagctgaaatgcagaagttcccgcagctgttagtcaatgtgagagtgactgataaatataaagttgaagaaaatgaaaaagtaaaagcagttatttctgaagttgaaaaagaaatgaacggcgacggccggattttggtgcgcccttcaggaactgaaccgctcgtccgtgtcatggctgaagcgaagacgaaagagctgtgcgatgagtatgtcaatcgcattgttgaagtcgtccggtcagaaatgggattagagtaacgaagtctattatcagagagtgaacaagacaagcgaggtttacataagataattgtgagacatacggcaaagttgcttaaaaaacaattgaccgtttatgccacatgttgtaaaatcaagcttgtcttgttcttattttctcaataggaaaagaagacgggattattgctttacctataattatagcgcccgaactaagcgcccggaaaaaggcttagttgacgaggatggaggttatcgaattttcggcggatgcctcccggctgagtgtgcagatcacagccgtaaggatttcttcaaaccaagggggtgactccttgaacaaagagaaatcacatgatcttccaaaaaacatgtaggaggggacgattgaaagtccccttgaaatttgactttcttcgtctccttttacaatcttaggaggaagaaaaatatgtgtggaatcgtaggttatatcggtcagcttgatgcgaaggaaattttattaaaagggttagagaagcttgagtatcgcggttatgactctgctggtattgctgttgccaacgaacagggaatccatgtgttcaaagaaaaaggacgcattgcagatcttcgtgaagttgtggatgccaatgtagaagcgaaagccggaattgggcatactcgctgggcgacacacggcgaaccaagctatctgaacgctcacccgcatcaaagcgcactgggccgctttacacttgttcacaacggcgtgatcgagaactatgttcagctgaagcaagagtatttgcaagatgtagagctcaaaagtgacaccgatacagaagtagtcgttcaagtaatcgagcaattcgtcaatggaggacttgagacagaagaagcgttccgcaaaacacttacactgttaaaaggctcttatgcaattgctttattcgataacgacaacagagaaacgatttttgtagcgaaaaacaaaagccctctattagtaggtcttggagatacattcaacgtcgtagcatctgatgcgatggcgatgcttcaagtaaccaacgaatacgtagagctgatggataaagaaatggttatcgtcactgatgaccaagttgtcatcaaaaaccttgatggtgacgtgattacacgtgcgtcttatattgctgagcttgatgccagtgatatcgaaaaaggcacgtaccctcactacatgttgaaagaaacggatgagcagcctgttgttatgcgcaaaatcatccaaacgtatcaagatgaaaacggcaagctgtctgtgcctggcgatatcgctgccgctgtagcggaagcggaccgcatctatatcattggctgcggaacaagctaccatgcaggacttgtcggtaaacaatatattgaaatgtgggcaaacgtgccggttgaagtgcatgtagcgagtgaattctcctacaacatgccgcttctgtctaagaaaccgctcttcattttcctttctcaaagcggagaaacagcagacagccgcgcggtactcgttcaagtcaaagcgctcggacacaaagccctgacaatcacaaacgtacctggatcaacgctttctcgtgaagctgactatacattgctgcttcatgcaggccctgagatcgctgttgcgtcaacgaaagcatacactgcacaaatcgcagttctggcggttcttgcttctgtggctgctgacaaaaatggcatcaatatcggatttgacctcgtcaaagaactcggtatcgctgcaaacgcaatggaagctctatgcgaccagaaagacgaaatggaaatgatcgctcgtgaatacctgactgtatccagaaatgctttcttcatcggacgcggccttgactacttcgtatgtgtcgaaggcgcactgaagctgaaagagatttcttacatccaggcagaaggttttgccggcggtgagctaaagcacggaacgattgccttgatcgaacaaggaacaccagtattcgcactggcaactcaagagcatgtaaacctaagcatccgcggaaacgtcaaagaagttgctgctcgcggagcaaacacatgcatcatctcactgaaaggcctagacgatgcggatgacagattcgtattgccggaagtaaacccagcgcttgctccgttggtatctgttgttccattgcagctgatcgcttactatgctgcactgcatcgcggctgtgatgtggataaacctcgtaaccttgcgaagagtgttactgtggagtaataaatgtttaacccctttggataagattatctaaaggggtgtttttatgtccaaaagcgaaagaacgtctacagtggaaaaatggattaaagaagttgatggtacaggacccgactatcgatcgaccatggctatagatttaagatgtttcctcattagatcggtcaatcaggttaaaaggcattaaaacttggagagaaactgcttttgcctaactgagttttctaatgttaatacagatataagagagcagttcctcattaagatacgcttttgatagcagttggaatttagcatgctagaaatccgaaaaccggagagcctattggaatgataacgtgtttttttattgacaattaataaagggcaaagaattctagaagtcgcacttacaatgtacttgtgggattaggttttaaagttcattctttttttattgagtacattccggttaaagttgaaatgattcagtaaaggacacgccataaataaaaggtagcgtatgattgccattctttccatggaaccgatatttctaagatttcatctttcgtaggctttcggttcatattacgtaatatttttatcgaatgaataagacccacatcatcgattggaaaagctgtcgggaacctaaggcagcgcattagaacataattggctgtccaaggaccgattcctcgtattttaattaagtttttttcagcatctttaaagttcattttcattaatttttccctcgataattctccacttgccattaatctggctattccaatgatatattcactttttttcaccgtcattttaatatctgccaggtcggtaggggttaaccgtgcaattcgctcgtacggtgggaacacccaatactttttaccattccattcaatagaatcgccaaatgcttctacaaattgcttctttaaggagtacgcgaaggctaagttaatttgttgccctaaaactccccaacataaagcttcaaataaatcgggaatgccgatcactcgcaacccataaaattttcgggcaggcattttaagtaatggatctgcttttgccatttcataaaatggagttaaatcgttatcaagatcaaaccattcatgaatatattttacaatctcttcccgtttccactgctcaacaggtctagaatcgtttaggaattgaacaatcatttgtttattattgattacgcttacctgcactaaggaccgaatttccccaatggctataacttttgtaatgatattgttctctatttcatacatgcattcatttttttccctggttaggtagccaaggttcgcattcatgtcgaaaatttcaggtaatgtaatgacaataacatcattgacttcatgccatgtcactttttcattctccttatcttaaataattataagaaaactcacgctggttgaaattagtttatcacataatcatctttactcattttgttatcttgctattacattctaaccaccttatttttttctatttatgaggttatagtgtagttatcaagaatgctaaacgggagtagataaaaatggcccaagatataaaaaacgcgtgtcgaaaatttaaattgggattcaattcaaagaattagatgagcattgtaaggagaggtgagataaatgccggatagtatcaataacggacataaagagagccatgatcatagaatttcgaatgatgcagaaatgataacagatgaaaagtggcaagcaattataaataatgatgcagcgtacaataatcaatttttctacgctgttaaatcgacagggatattctgtaaaccatcctgtaaatctcgcgttccgaaaaaagaaaatgtatgtatctttccaaacacagaacaagctctccgcgcaaattttcgcccttgtaaacgttgcaagcccactaatgaaaaaatgcctgatagcgagtgggttgatttaattactgaatacattgataaaaatttcacagaaaaattaacgctagaatcgttagcagatatttgtcatgggagtccgtatcatatgcatcgaacatttaaaaaaattaaaggcattacgctggttgagtatatacaacaagttagagtacacgcggctaaaaagtatttgattcagacaaataaagcgattggagatatcgctatatgtgtgggtatagctaacgcgccttattttattactttatttaaaaagaaaactggacagacaccagcacgatttcgtcaaatgagtaaaatggaggaaacgtacaatggaaacaaataaaccaaccctttattggtctttactaatgttcaaggattggaatttttatattgcttcaactttaaaggggcttgtgtttgtaggttcacagaacaaaccaatcgaggaattgttcgaatgggctaggaaacgctttccgggaagtcttcttgttgaagatgatgataagcttgaaccctatgccgttgaaatcactcaatatctagaaggaaagcggaaaaactttactgttccagttgagtacgccggtacgcaatttcagctagccgtctggaatgcactttgtgaaattccttatggacagacgaaatcctattccgacattgcaaatgatataaataaaccagcagctgttcgtgctgtaggtgcggctattggggctaatccggtattaattactgtaccgtgccatcgtgtaataggaaagaatggctcattaactggctatcggggcggatttgaaatgaagacactgctcctcgatctggaaaagcgagcttcatctgaaatggatgttcctcattgaaagtgaatcatctataatgggttggattcttttagaggaaagtaaagaccagtttactgataaacttgacaacttttaaaatttagcatatcttatacgtaacttaataatcgatgcagatgtttatttttccttttaaaatatgtaggcctttagcattcttttcatatttcattttaaatattgataggatgaaaaagtatcctaataaaaaaggaagagaacatgagtcgatttatttgataatcaggactatattaaaggaaatgaaaacatagcataaagtaaagaccaataataaggtagctcttcaaaaaacttcgctgaagttagttgaagtgaagccgacaattttcaggattcaatgatctaacataatcattgaaattttgaagttgtcggcttttttgttggaaaaaaatagagataaataaaaattgaaataaataatagacaaatatgatctgattgaaaggtcttttgaccaataatgagttttaaaaaagggagaatttagaatgttagtttcgctgagtttgtcatcattattaacattattttttattatgcttatggcttctgggattagtggactattgtttttacatccgcgtgtacccttgagttttgttcgcattcatattgggatcttggctttaccacttttggtttccttactgattcttgccaatagtggtgtgagtggaaatgttggcccttggcacttagattccttagcttgtttaatgactttctttgttcttgcaattggattcatcattcagcgtttttctgtacgttacttaatgggggatcgatcttatcgaaaatattttacgctttttactttcacaacaggagctgcttcaatgacatggttaagtggtgatctccgcttgatggttctattttggggagcaactcttgttggtttaaccttacttataaggttaaacagtgcttggcaagtggctagtgaagcagccaaaatttctggacggttatttttgttaagttggttttctttgttttttgcgatgatgtggctttttcatgccacaggtcaatggcagctatcattggttgtaacaaatgaaagtttagctgggctgggagaatgggagagaacagggattcagctattgattgtactggcggtgatcattcctgcagctcaatggccgttccaaagatggttggttgagtctattgttgctcccaccccagtttctgcaattatgcatgcaggtttagtaaatgctggaggaataatactaactcgattttcacctctatttcatggtggtatcgcttcgattatcttacttctgcttgctagcatttctgtattgattggaactggaattagtttagttcaggttgattataaacgccagttagtaggctccacgattggacaaatggggtttatgctcattcagtgtgcattaggcgcctatatagcagccattattcaccttattttacatggtttattcaaggctacgttgtttctacaggctggttcagcagtagggcgtcatgaagtatcgactcgcactaatgaaagaacatcctatttatgggtcatggctggtcggattttatccttagttataggtgttgctttttggctcactgctcctggagacgggtatcacttaatcagtgcgctgatcttagggtggtcattgtccgtttcttgggatcagcttgtcgcttttggagagggccgaattggccggattgccggtttaactgttttaggaggagcagccctcgtatattttatcattcatcaccttttctataagtggctgcatacaaccatttttcaaagtgttcaacctccaatgtcagctgtcatgattgtcgtatgtctcttactctttggcagtgctttaggtacgtgggttgctcgtcatcgttcttccgtttttttcgcggtactctatctttggttagtccgattaggtgaagcaaaaccaaagtcagtagagagtcacccagactaccttaaacaatatatttcataaggagctaatctgagatgggcattacatccgtattaacgaaagataatgtaaaaaagatagatacagatattgatgttcaagaaagggatcttaacgttttcattacatctgccagccgagtgattgcgccactttggcctatttctacatttgctgcacgtaatccgtggatgggacttgaaaaccaaccttttgatcaggttgcaagttggttgaaaaacactcgcgatgttgatatataccctagtgcgtctatgatccgttcagcaaagaataaaggtgagattgatgaagattttgtggaaatggggctgcagcgttggcttgattcacattcctatcacatcccacgggacgtagcagagcgattttgtcatgctgcattaaagttagatcccctgccttccgaccttttatcatcacatgagctggagaaattagtaagtgaatgtagtggattggatcatatcgagaatgtgtttatgcagccactaagttcgtatatagagaatcaagatggtgaaaggctagtcaatatactagatcatcatgtcattaaatggagtaaattatatcttgatgactctcaagcgggttggacaatgcctaatcgtgaggaaggtttctatcgtgcttggcagcatcttattcaatatgatccagcacttagcaaaaagcagcgagaaagggtaaaaggttggccgaaagaggcacatttggctttacaagaagctttattcgcactagaaatcccagagtcagaaatccagacttatcttgaaggtcatttactttcattacctggatgggcagggatgatgctttggcgctcccaacaatcgagccacgaacatgcactactaacagaatatttagcggttcgaatatccatggagtgggctcttataaagccatacttacctttgactaatgaacgatctaagaaaacaatttcaattgctccccttatagcagcttggattcattggggtgggcttacattagaagaatggtcacagatgacggccagtgaacaaaacgaatatttatcatttgcctacagctttgatgagaaacttcgcaagaaactttggttagaagcttgggaacaaacgtacactgatcgattaagccagaagatcatctcgaaacaacgtgaaaccggccgtgaaaaatctgcattagctcaattagcattctgcatcgatgtacgatcagaaccttttcgtcgtcaactagaaaaagaaggcccgtttgaaacgattggtattgctggtttcttcggggtgccgattgcaacttgtgaacttggcagtaaacacagtcatgcttccttgccgatcatacaaaaaccgcaaaataaaataaaagagttcgcagatgaggatgtattcaaaaaatacaatcaacggaagcaagcaattcattctttaagccatacctttaaaacgatgaagcagaatgcgctttcgagcttactactgcctgagctaagtggaccttggcttactctgcaaatggcagcccgtagctttgtgccaagaaaggcgggtcgtttcattcgtaatctccgtgaggcttggttacgcaaacctgatacaaaactctcgcttcatcatgatgctacagaggcagaaatacctgtgggttttactgatgaagaaaaagtgaactatgctcgccaagcattaaaaatgatggggttaacagagaacatcgcaccattggtcgtgatttgtgggcatggcagtcaaagtactaataatccttattctgcagcccttgattgtggtgcctgtggtggagcggccggtggattcaatgcaagagttttagctgctttatgtaatctatcagaggtacgagaagctcttttagctgaaggaattaaaattcctgaggatacagtttttgcagcagctgaacataatacaacagtagatgaattacattggctttatgtaccagagctttccgaagctgcacaagaagcatttgaacaaattgaagccgttatgccgaaagtgagacatcatgtaaacgcagaacgtctagcccaattaccgaatttccaatcgaagctaaaaaatccgaaggctgaggcaaaccgatttgcggaagattggagtgagatacgtccggaatggggactggctcgtaatgccgcttttattatcggtaaacgtgaattaactcaggattgtgatttggaaggcagagcctttctccataattatgattggaagcaggatgaaagcggtgaactcctagcaaatattattgtaggacctggaactgtagcccaatggattaatttacaatattacgcatcaacggtagcacctcattattatggcagcggaaataaagcaactcaaaccgttactgcaggtctcggcgttatgcaggggaatgcaagcgatttgttagccggactgccttggcaatccgtcatggaatcagatcacgaggcctatcattctcctcttcgtttattgatactcatccaagcacctagagaatatgtagaacggttattaaatcatgattcagcatttctgcaaaaagttcaaaatggatgggtccgactggctagtcttgatccagaaggatgttgggaaagctggtaatgatgaatctaagcatttatcaaatggatttgttactcaatacaaaaatgataaacataaggaagaggtgtgctgtatgaatgtaaaccaaaataaaaaagtattatttttgacggatattgaaaacggtttggagcctattttacaagaagcgactaacacttctgcagagaatatgttgactatacaaagctatggtgccagtatttcacatccttatggagaaatcatgaggtctgttatttttgcgatttaccaggaagatgttgaggagatttttgtagtaggaacaaaagataagaagacttctgcaggtaatggactaactcaacttgaaacaatgaaagataaaatacaaacattggattatctgtttcaaaattgcaagcctgaatttttaggtggtacggtcgatgaatggctaaatgaaaatagcagtgacaccattgaaaaaagtgttgatatgattcgacatcatcccctagtgccgtcatatgttaaagttagaggtttattcgttaatcataagggtggaaaaccctcaatcgcggaggttcctgatgttaaaacaggtcaagccatgcctgatcattgcttgtcatgatgaaatgcaggtttaacttctaaacgcacccatatatggagaaagcagttctaaggagattgtatgagcgctaatttaactgattttgtcacgaaaacaatagaggaaatgaactcgtttgatcgtgaaaatatggaatgtataaaaaaactaattagaaaagcaattgatttttatcatctaaagtcttatgaagaagttgaggaaacccattcaggaaatgttcgatttttgcatgtccactctatgatggaagaaaatatgttatccaaaatgatagtggtcacaagaaacggtaaaactgatttggatattgaaggtgtatatgaaggatatgttgtaagagaatattaatgagacgaaatcacaaatagaatatgccaatttttttgctcaggagatgtattagatatgaaaaagtctaagggttctattgaatcagagatcagtaagtccattactcaatgggagaaggattatcttgggcgggggtctgtatctgttaagactgatatactgcgggacatgatcatcgtcaatttaaaagggattttaacaccagccgaatatgtagtttgtggatcaaaagagggtatgttatctatcaaacaaactcgttcagagttagtcgaatcaggtatagaaggccttaaggatattatcttaaaaataaccggagaaaaagtgaaaagttttcatactgatttaagctcccggacaggtgaacgagtgatggtatttaaattatgtaatgatctagagaaaaatttggaaaagatcttataatctaaagaaaataaatgttttgacggtgtggaatttgttgtgaattgaacataaagaactgccgattcttttgttttacaattatggtatcattgataacttttattcatatcctaagcggacataaagagatgtcaattcatagtacactgtcatgttattcctgtcgaaagatctaacatccgctgttgttatgagcggatgtttttttacatctattttaaatacatgaatttgatgctggtgattagtcacttgaacaatatttgaaaacatccttgtcacctgccgggtttccccaagtgtttagtgacatgattatgagaccaacttcgtaaagcttgctgataaatttaagcggtgaacaaaattgatatgctgtcttcagtttcatttcacggaattagtcagagataaacctttaattaaatatatccaaaaaacggattgacatatcgaaatataacgatataataatcgatatggaaccaattgaagtattcaaagccttatcaaatgaatcaaggctgcaaattttacaatggctgaaggagcccgatcgtcattttgcaccccatgaagggattgatatgaacacaatcggggtatgtgtcagtcaaataacagacaaattgaaaatgacgcaatcgacagcttctcaatatcttaccatccttttaagagccggcctaattaaggcggagcgaatcggaaagtacacgtattataaaagagatgaagaagccattgggaaacttgctgactttcttaaaacagagatataaaaataaacatcaaaagatgtttatttttacaccatacatatcgacatattacgatgtgtttatttttttataataacatatcgataattcgtgatatgtttattaataattaaggagtgaatgttttatgtctaacacttggaaaatttatattttagccattgtcagctttttagttggaacctcagagtacatcatttccggaattttggatcaaattgctcatactctcgggatcactttagctgccgcgggccagcttattaccattttctcacttgtatatgctctttctacacccgtacttatggcgttgacagcaagtatggatagacgcaaattgatgatgtatgccctaggtttgtttgtgttcggtaatgtcctggcttttgtactgcctggttatggatggtttattgcagcgcggatcattatggcgatgggagcaggtgtggttgttgtcaccgcattaacgattgccgctaagattgcatcggaagggaagcagggcagtgccatcgctacggtcgtgatgggatttaccgcttctttaatcattggtgttccgcttggaagaatgatagcagtagcattaggctggaagtctgtatttggagccattgctttgttgggattgatcgcaatggtcgttattttctttactcttccgtatactgaaggggataagcctgtgcctttgcttcaacagcttgctcttttcaaaaaacggaaagtggctatgggattatcaatcactttcttctggctcgggggatattctgttgcttacacttatttgtcaccgtatctcttgaacatctcaggtataaatggcaagctgctcagcggtgttttgcttatatttggaattgccagtttggttggatcgaagtttgggggatatagcaccgataaatggggagtgccctttacactcgttggcgggatgacgttgcatatcgtcacactgattctgctgtcacttgttactcattcctatatcggagtgttggtgattctcatattatggtcgtttgccgcatggtccaccggtccgacacagcaatttcacctggctacaatagaaccggaaatgtcaggtgttttgcttagcatgaatcagtcaatgatgcaattcgccatggcggtcggcgcaggtataggaggggtttttgtggaaaacgtatcattggcctcgattacctgggttggtgcgttaggggttatgattgcaattattgcatcattgctgattttcaattcgcaaccgaaacaagcgctaaaagatatcaatcaataatttcgaaagttctaacatccgctcgttatacaagcgggtgttttttttagcgtagtcagtccatgcatgagtcttccaagggccgacatcgttctgtatgtgtcgaaggtgcactgaagctgaatgagatttcttaaggctttgccgcggcgagctgaagtacagtacgattgccttgatcgaacactggaaacacaagagaacgtaaacctgaacatccgcgtaaacgtcaaggaagttgccacttggggagtaaacacttgcatcatctcgctgaaaggcctagacaatgcggatgacagattcgtattgccggaagtaaacacagcgcttgctctgtttccgttgtcgattgcagctgattgcttactaatgctgccctgcatctcggttgtgatgtcgataagcagcgtaatgaagagtgttactgtggagtaagatgtttaacccctctggatattttagccgaaggggtttttagtatagatatttgatttaaattacaggagacttcattcatttaaccaaagtcattgctttcttaatcactaaagtttatttgaaaataatctcttgatttaatttcctcgaagagattttttgtcaatctattaggcatcagaatttttataacataatggaccgtctttttgacgttttgtttatagaacaagaaaatattcaaaacataagtggaaaattaggggtgagctcctgtttttctcgagaggatagcttgtcagcttttctatttttaaagggttaaaatattctatttatactaattaatgtaatttttaggataatatacaaaatcccccttacttcgacaattgcaatctggtattatcgtatcgcatgggagctatgtcaatagactctatgcaaaaattgagaggaggtttacttatgaaaagaaaccaaaaagaatgggaatctgtgagtaaaaaaggacttatgaagccgggaggtacttcgattgtgaaagctgctggctgcatgggctgttgggcctcgaagagtattgctatgacacgtgtttgtgcacttccgcatcctgctatgagagctatttaacatttgagaatagggagttgagcgtatttgcttatactccttattttctcttaagggggattttatatgtcatatgatcgtgttaaagattttgatttgccagagttagcggttcatttacagcctcatggtgctgtaatgattgatagaaaaagtatgttttatttcagactcagtggacgtggagcacagttggcgtttctgttatcaaaaaacaaaaatcttcataaaacggcacgtatttgggagattatgaaaaaagaagagatgagtgctgaccaattaaaagaagagcttagtgcccatccatttacggaggcttggacggaagggctgttagatcagcctttacacgtttcgggttcgctagattcatatttacctattagttgtaccttacagttgacaaatgcttgtaatttaagctgttcgttttgctatgccagctcaggtaaaccatatcctgaggaattatctagtgaacaatggatattggttatgcaaaagctagcagcccatggagttgctgatattacgctgaccgggggtgaagcaaagctgatcaaagggtttaaagaattagtcgttgttgcaagttcgttgtttaccaatgtgaatgtatttagtaatggattgaactggcgagatgaagaagttgaattacttagtcacttaggcaatgtttctgtacagattagtattgatggtatggataatacacatgaccaattaagaggcagaaaaggcggctttaaagaaagtatgaataccattaaaaaattatcagaagcaaacattccagtgattgtcgctatgaccattaatgagtccaatgctgatgaagtatcagatgtggtggagcaatgtgccaatgcgggtgcttttatctttcgtgcaggaaaaacgttatctgttggacgtgcgacagaaggctttaaggctttggatattgattttgaagaaatggttcaaatacagcttagggaagcacgtcataaatggggagatcgcctgaacataattgattgggagcacgaagagagttcgttcacaacagatttttgtacaccaggatatcttgcttggtatataagagcagatggatacgtaactccttgccaattagaagatttgccgctagggcatattttagaagatagcatggctgacattggttcacctgctcgtttgcttcagttaaaatgtgaagcaaaaaattgcaaatgtatagggaaaattgagctatctgaaccggacttaccttttcaaaaagaagtcaaggcagggattcaggaatgaatagtctatcattggtgttctggagtattttagcagttgttggattactgttatttattaaattcaaacccccaacaattgcttcactactcttaagcaaagatgaggcaaaagaaataagcattcaatttataaaagagtttgttgggatagatgtagagaactgggatttttattcagtatattggtatgaccacgatacagtaaataaacttcatcacttaggcatacttaagaaaaatagaaaggttttatatgatgttgggttggtcgaatcatggagagtccgtttcgttcaccagaatcaatcatttgtagttggtgtcaatgccaatcgagaaatcacttttttttatgcggatgttccgaaaaaaaccctttcggggaagtttgaacaagtttctccagagacactcaagcagaggttaatggcttcacctgatggactttggtctagagcaaatatgactggtactggtaaaaaagaggaggattttcgcgaggtcagtacttattggtacatagcggaagcgggagatattcggctcaaagtgactgttgaattacagggcggccgaatttcttatattggtactgaacaagaaatactaacagatcaaatgagtaaagtcattcgagatgaacaagtggaatcgacattcggagtatctggtatgctgggttcagctttagcgatgatccttgcgattctcatccttgtatttatggatgtgcaaacaagcataatcttcagtcttgttctgggtttgttgattataatatgccagtcattgacgctgaaagaagatattcaattaacaattgtaaatgcttatgatgcaagaatgagtgtcaaaacggtcagtttattaggtattttgtctacacttcttacaggattattaacaggatttgtagtatttatatgttcattggcaggaaatgcgcttgctggtgattttggatggaaaacgtttgaacaaccaatagttcagattttctatggaataggagcagggctcattagtttaggagtgacttctctgctgtttaacttattggagaaaaagcaatatttacgaatttcacctgagctttctaaccgaactgtctttctatcaggttttacctttaggcaaggattgaatatgagcatacaaagttcaattggagaagaggtcatctatcggctattaatgattccagtcatttggtggatgagtggaaatatcctcatctccattattgtatcttcctttttatgggcggtgatgcaccaagtaactggatatgacccaaggtggatacgttggctgcatctatttatattcggttgctttctgggagttctcttcatcaaatttggttttatttgtgtattagtagctcatttcattcataatttagtactcgtctgtatgccgctgtggcagttcaagcttcagaaacatatgcatcatgatcagccaaagcatacttcactctaatgattaggagaagatttgatgcaattgatgcaagtacaaaatttaagcaaatgctatcgaaatggtgatggggttgaacatttgtctttctcaattcaacgaggagaaatcgtggcgctattggggccaaatggagctggaaaaacaacgacaattcgatgtttgacaggtctctataagccggataaaggagatatcctcattgagggttctcctccaggagatataaatgttcaaaaaaaagtcgcgcttattcctgatcagccatatttgtatcccgctttaactgctgctgaacatattcagtttagggcaagaggatatcatccaggtaaaaaagatgtaaaagaaagggtttatcatgcattgaaggaagtgcacttggaggagaaagcaaaccaattgtgtggtcagctgtcaagaggccaaaagcagcgggttgtcctggcgggggcgattgttcaagacgctttgctgtatatattagacgaaccgactgtgggccttgatatcccatcaaaacagtggctctctaactggttaaaaactaaaaccgatcaagggtgttcagcatttgtatcaactcatagtctagagtttgttatagagacagcagacagggtgatattaattagagacggcaaactcatgcaggatttgtatgttcctcaattcgaagaacaagcggaatggagaaaagaagtgattcgtcttctaggggaatggtcagatgaataatatcatttcttttttatggcttcagtcaaaaaggcgttttgtaagtcaaggtcaggaaaaaaaaatgccttttttgatcatgctcctttttgttggggccatcggatttcaagtaagttttgtttctagatctacgacatgggatatgagtattgctggttgggtacttacaggtgtttttatcctttatacggcatttggacttttttcaaatcgattaccaagtcaaatggcagatattatatggctttatggcactgccacatctttttcaaaagttgtgtatagtgttttatttttcagcgtcacttggaaggcgttgctttggatcatctcagccatattcggtgatgtattaattgtgcttctgtctggtgatcatatcaatttattaggccgatccataatttttgtagggctcttttttatcgctgaagtgtggttgatgtcggtctcttgtgccagaacagtgaagaaaatgaaaagggtatacgttttagtctttcttctaatgttaggcatttactccatatgtctttatcgcttcttctttctccaacattcatctgggatatgggagagcattgcccgttttattagtggcgttggattagtgtttgatacattgtcaccgttgtatgtggttgtatttattgggattatcacagtctcttttatgacaattgcttttacgagccgtcaggtagaaatgaaggaatcgttggtgaaagaagctgaattctgggaggaatttcaagaacgtcaatttggttcaggtcaaattatacagaaaccaaaaacgacttggtggggcttgcaaggtctaaatggcatttggtcttttctgtggttggaactgttgctttttaaaaaatatttattttttcatagcattcatacggtcatgctcagtggcgtcttttatgtcgtcattttcatgtatccagaatggttttatcttctattctttcttatcgtctcggcagtcatgttaagttcctattattcaggaattgtcagacattctcaatcaggcacccttcatttattccccggtgccctttggaaaaaaatcattattctagagctgacgaatacagtctggttgtatattctttactgtgtttctattacttttatggcagttgggaatttagtttattggtatatatatggcttagggatatatatatggttcatgacaataaggctttttgcttttacccatacaaaccgaaacgatattaagctttcattgcctcaatactacaagtcattttttatggcattaggcctgagcggcatttgtttgtatgtcattcatttattgactgctgactggtatacattagtggtggtcgtctgcatagggagcctaagttggtgcctgttttatcgtttcagatagtggttatgtagagttattgttttaaaacgaggagaggggctcttttatgaattcaaatggtgataaattgtcgttatctgttcagaatttagcgaatacaaatgagatcacaattgttcaagcgataggtgagctaaagaaatcgggaaaagatgcaataccagttttggttgaggccttaaaagaggaaggctctttgtgtaatattgctgcagctgttttaggtgagtttggggaagacgcgagtgaagcagcggaggagctatcatgtttattaaaaagtcatgcggaagatacaagaatggcagcggcgatttcattaatgagaatcgggaagcccagtctgccctttgtcatcaaaatcgctcaagaaagtgaagggcaatcgtgcttttgggcatcttggtgtattgcatggattgatccgtcttgcattgaacctaagatgtataaatgtctaaaatacgagcatgaacatccttcaggaatagttgctccgtttgcggctgaagaggcattaggaaagctgattgcttttcagctgaaagataaggaggactgaaaggatgaaagatgaacaaatgttgactgaatggccaagtcatttaccatggttgaatcaatcacagaatgattttacatttccaagtgacacatatcttcttctttatttttggtcaatgagctgtccaaactgtcaccaattaacagacaaagtccttcaagatataaaggatatgaatgtgaaagtaatcggagtacatgtcccctatatagaagaagagaaatctatggaggttgtcttgacgtatgctcttgataggggactagctattccgattgtattagaccaaaactatgagatcgtcacaacttgtcacgtacaaggcatccccagcttttgtctattaagtcaatacggtcagatcattactaaaacgatgggagatgttggttgggataagatgttaaaaaagattgcaggcttgtgaaattttccgtcttgtatgtgcgacaaacggttgaatattatgatgaaacggtccttcctataagcaggaaggttttttaatgaaatatttttttattagtaggtaaattcatcaaatgttctgctatgctccaaatgtacacctttccgtaagggcaaagtcaaatgtgaaaaaaaactgttccaaagttaatcagaaatttattttcatattgtatccttcggtatcaagtgaaaggagcatcatatgaaaacattatggaaagtcctcaaaattgtttttgtcagcttggctgctttggttttgcttgtatccgtctcggtatttatttatcaccatttccagctaaataaggaggcggcactgctgaaaggtaaaggcacagtagtcgatgttgacggtaaaaagatgaatgtgtatcaagagggaagcgggaaggatacgtttgtgtttatgtccggttcgggtattgctgcgcctgcttatgaaatgaaggggctgtacagcaagttttcaaaagaaaataagattgctgttgtagatcgggcaggttatggatacagtgaagtgtctcacgatgacagagatattgatacggtattggaacagacgaggaaagcgcttatgaaaagcggaaataagcctccttatattttaatgcctcattcgatatccgggattgaagcgatgtattgggcacagaaatatcctaaggaaatcaaggccattattgcgatggatattggattgccccagcagtacgtcacgtataaattgagcggagttgaccgattgaaagtgagagggttccacctgttaacctcgattggttttcatcggtttataccttccgctgtatataatcctgaggtgattcgacagtcgtttttaactgatgaagaaaaagaaatctataaagccattaactttaagcaattttttaatgcagatatggagcatgagcttttacagtcttaccaaaacggcagcaaatctgtgaatctgcctgcgccaaaggaaactcccgtcttgattttagatgcagtctctgaccaaaatagacattcaaagtatgctatacaaaaccgaaaagactatgaagcgtttgcggctcaattcaatactgccgatataaaggaactgaggggaacacacagtatttatttatatcagcctgatcaaatatataaactgtccatggagtttatgagaaaggttcgctaggatgaagggttatcgtattttaatcgttgaggacgatgtgatgattggtgatttgctgcaaaagattttgcagcgcgagggatatcgtgtgatatggaaaacagatggagcggatgtgctttcggtgattcagaaggtggatttggtcattatggatgtgatgctgccgggtgaagacgggtatcaaatgtctgcaaaaatcaaaaagctggggctgggcattccggttatttttctctcagcccgcaatgacatggacagcaagcttcaaggtttgcagatcggcgaggattatatggtaaagccctttgatccgagagagctgctattaagaatgcggaatatgcttgagcatcattatgggacctttacgcaaatcaaacatttgtatattgatgcggtaacgaaaaaagtgttcaatgaaagcctgcatgatgaggtattatttactgcgattgagcggaaaattttcttttatttatatgaaaatagagacagtatcctgacaaaggaacatttctttgaatatctatggcagctcgaagatagaaacccgaatattgtcaatgtgcatattaaaaaaattagagctaaaatcaatgatcaagcgggtgagatgattgaaaatatatatggagaagggtatcggctgaataccgttgtgaagaaatgaagctcaagacaaaatatcagttgttattgtttacggccgtcattagtgttccgatgctattgctggcggtcagtgttttgatgtcggtgatttatgacagcatgtttaaaccgatgaatcatggtatgccctttcacaggtcgtttgcatacccggcaatgatcgttgtatttttgatatcactcttattgttagcttttttattttcaaagtcgattcattctctgttgcataaaatcaatctattaaatcaaaccattcggcatttggcgagtgatcaaagggtgcccgataaaattgaagtgaagcgtgctgatgaaatcggggaactgatcaagtcggtcaatttgttaattgaacggacgacatatcgtgaactggagctgagacagcaggaggaaatcaaaaaggagcttttgcaaaaactgcggcatgacattaatacacctttaacggctctcaggctgcagttattttatttggaagaccaatgtcatggtcaggctgtattcgaatcattgtatcagcaaatcgaatatatctcggaattaactaatgaattcaatctatattccgctgagacgctggaaagctcttatattgtaaatgaagaagtgcgtctaaacgagctattagaaacagcggtgaaaaagtgggattatttatacagtatgagtgggattgagctgcactataagccggcagatcaagatgtgatatggatgagcaacacgttatggatggaaaggctgtttgataatatttttcaaaatacgttaaggcattcaaaagctaaaaagatggaagtcacgattgaacatggcgatgtttttattcgtgatgacggtattggatttgatcggaatgagagcagtgagggacttgggttaaagattattgaggatacatgcaggctgcttgcgattacttatgagctgcatacaaatgataacggaacggggttcttgttttcaaaagagtgaccccgctgatgtttttctttctcctataaaatttatataatagggagaaagaaatggggtgaacatcatatgtttaaaaaaatcatcaaaacgattaagtacctctcaagcagttctagtgaccgatatcgcagacaccggcattacagcagcagccggcgcagacattatcgcagctacagcagcagttcgggcaaaagaagacactacgaccgttatggcggcagtcatcgttacaaacgccggagctacagcagcagttaatccaaaaaaagttcttgttccgcttttgggacaagggtttttttatgtgaccgattgaatggcccggtttagatcctcgcgaatggaagcggtgtgctgatactcttcctcaatgcccaataatcttttcagcagcaaggttacttcctttgtcagtgttaattcctccagccaagtgccgtttttcttcttttttcctttatattgagagtacagcaagaataacagcgtttctccgagatcgaagaagtcatcctgttttcgtacctttatttcctccatttcttcaggagtcaattgtttggcaaggccgaaatcgatgaggcagagcctgccatcattgatgatgatattaggcgttctgatgtcgctgtggaagataaggcgatcatgcaggtattctataatctcaagcagctgcgaaatcagttgtaacgccataagctctgtgaacggctgttttcgaaaaaataataattcttctatattctctccctcaatgaactgcatgacataataagcctgtccgtctatgatgaattcatctatgaagcccggaatttgcgggtggtgaatgtttttgagcagttttatttcctgctggaatcggactttctctttttcctttttggcttttgtcggccgaagctgttttaagacataaggtgtttgagctaggatatcggtgcacaaataaaccaaaccgtagcctcccataccgaggcactcttcgattttgtattgatgatttaagataacgccgttctttagagggcggtcaaatagcagtttttttagaagttttaatgccatgtctgcacttcccttggttgtactgactatagtttaccttctagacggagaataaaaaagagccggataaccggctcggtataagttaaaactgctttgtcacgtcgtattcataatctatttttgcttttacgttgctcatcgtcgatctggctgtcgctaatgtattatatttaaaactccatacctttgccacactgagttgatccgacaaagagatatcataagaccctgaagtcgagctgtttacaagggcacggctccattcgttattttcgcttgtcatgatcagatggcgtgtatttccctggcttggtgtttgagtggcggttgtttgaactctggttacaatggcatcacgcggtatcccagattggtttgttaaatcaaccttgatcacgctggagtcagaacctgaggggctaaggcttgtatttcctttattttcagcaacgccgctgaattggaacgttccgctgcctgatttgattcggtcttcaattgaaagcgtaaagtacatgtttccagtataggtgcctcgtgacactttcacatagaaggtatccgtcgtgttttgggcgtctgcatttgcataaataaaagaagaaaacgtattagggttaataacttctgtcccttgagaaacaggtattctgttcttgtcataaatttcaattttcatccctgtatacgcgctctggtatgtactcctcatgtatactttttctcccttattagccgtaaaagtgaaataggcttcatcttgaccagcttccagtattgttgtatcgatatttttatatttccaataaccgatcggcattgcggtatcaaatgaattgtttcctgtgatagcagtgactccgacagctgatgccgaatacgtaaaggtagataagacagaaagcataacagcgaattgaataagccattttttcaccatgcaaacaacctccttttatttccatcatacataataacgatttaggtgtaaataaatgttttttgaggttaatatatacattatattcgccgataaaaaagaataagagagaatactcgggagggaattcaatgcgtctgaatcggcaatttatccgcactcagctgattgcacagaacatattgagcaagaatgcgcctgccaaacgggagaatgcgactgaaaatccagcggcagttctggaaaaggcatatagcaggcttaagtcacaatcttcaactgggggaatcaatcagttcaattattctaaaaccagcgtgtcgggaaacagcgggacgttcagcaaagtgtatcaatcagcgaatgatcgaacagtgacagacacaggggaagaaacagtgattcaatcccaaaacccctatgaatctgagagtgatatcagaatcaaaatactagatgaaaaatacagcaggatgaatgcgattaataaaacaaagtctgatccattaggctatattaaggataagtaccaaaattcaaagtctccttatttcagaagtgatctgtcagctgcagaaagacaggccgcttacgataatgaaacagaatggttattcaaagggaaggcgcaaaactataaccttcaggatgctgtgtttcggaatgtcacatttcatggggaagtggaagctgagaatgaaaaggtgtatcagcggggacaggttaaccagcagctgcaagtactgttgaatcgaaaccatattcatattccagaggggacagagctgacgtttacaatcacaccgattgactatcaggtgcgggtaagcgggacagacgatcaggatctgatcaagcaaattgagcaagtgctgcaatctggagacaacagcaaagaactatttttacacatcatgaaaagtcaaagcagtgattcagcacaattttccgaagaggcctataaaaagtatcaggcagctcgtgagatgtatgaagttacaggctaccatttgaaggatttagaagtgattgatgggcggtacgtcacgcctgagggacgtgacttaatggatgtatataaggaagagcttgaaaaagatccagtgcagaaacaaacggcttcttatgctatatcttactatcgttcagagctcagtaaaatcgcggaagccgggtataatgccattccggatttcatcctatcaattgattacagcaatggatctctgagagatgtgggacaaagcaagagctatgggaccggagataccgggtggcttgaagcattaaagcgtcaaacgggtgtgaattattaggtaagctgttcatgtaggacagcttattttttatgagaatctaaggggtgaattaatcccaatattcaaataattttattatttttatataaaagattttaaaagaagtgaacgattcaaaactctgaacaaaggtgtttacctgaaaaaaacaattgtattttccagagaaatttattatgatgaaataagtaatttaggagattatataacaattttaagtttgaattttctgattgttatcactgattcatgtgaaggcaagcaggtctgctgttttctcatttatgagtattttgttaggaggaggaagaggagtggcaaataaagaattaaagaggggcctgggcgcgcgccatattcagatgatcgccttgggcggtacaatcggtgttggcttgtttatgggttctgccagcacgatttcatggactggcccatctgtccttctggcttatgcaatatgcggaatttttatcttttttattatgcgtgcgatgggtgaaatgctgtatgtcgagccgagcacaggttcttttgcgacgttcggccatcaatatattcatccgatggcaggttatataacagcatggagcaactggttccagtggattatcgtcggcatgtcagaaattatcgctgtcggttcttatacgaagtattggttcccggatttgcctgcttggatacctggtatcgtggcaatggtgattcttggtgcggcgaatttaatttctgttaagtcgtttggggaatttgagttttggtttgcgatgattaaaatcgtgacgattatcttgatgattattgcgggaatcggaattattttcttcggttttggcaatggcggagatgcgatcggtttgtcgaacctgtggtctcacgggggcttctttgcaggaggtttctcaggtttcttctttgcactgtctcttgtcattgcagcctatcaaggagttgagctgatcgggattacagcgggtgaagcgaaggacccgcaaaacacgctaagaaatgcgattcaaagtattatctggcgtattttgattttctacattggcgctatttttgtgatcgtgacggtgtatccttgggatgagctcaactcactcggaagtccgtttgtgtctacgttctcgaaaattggaattacggcagcggccggcattattaactttgtcgtgattactgcggcaatgtccggctgtaacagcggtattttcagcgcgggccgcatgctgtatacactgggtgtcaatggacaagcaccgaaattctttaagaagatttcacgcaatggtgtgccgctgtatggcacaattgcggtgctgatcggtttggctgtcggcgttgtactgaactatatcgcgccgccgaagatctttgtctatgtatacagcgcaagcgtgctcccagggatgattccttggtttatcattttgatcagccatatcggattcagaaaagcgaagggtgctgcattagataaacatccattcaaaatgccgtttgctccttttacaaactatttgacgattgctttcttgctgatggttctggttggcatgtggtttaacgatgatactcgtatctccctgattgtaggcgtgattttcttagcgcttgtggtcattagttattatgtgtttgggattggcaaacgcacgcaggccaatttgacaaaaagcgaacaagcagctgaataacgataaaaaagagacattcacggatgtctctttttttatttttcgcgtatggattttccctattttagcaagctatagggtaaagatagcagaaggaaaggtgttcataaaatggatgttacactcggttatttgcgcgaatcactttcgaatcatctagaaaatgaagtctgccagcgtatttgcaagaagatgctggcgaagcgttatgcaaatgaagaggaatttgtaaaagacttagatgataatgaaatgtcttttttgaaccatgtattagaaaaagaaattaagtatgcccagaatgaacaggatcaaaaacgggccaaggaattaaacgaggtgtatgaattactgctttgagaaaggcgggtaagaaatgggagcaattgaacgaagcggatatacatttcagccggagtttagcgttgtccgtcaaaacggagccatccatgtgtaccatcaaggagaatttgtggaagaaatcgaatttgaatttaacggggaatatcccgatcatgatttgattgaagagcttgtgaatcattattgttttgagcatgagatttagagccctgccgtgcagggctcttttatttaggatgtaatcaggccatactttttcaggatatccacggtgatgtttttggcttttgtgccggaatcatcgacattggtgacaaagacataagagccatgctctgttttgatgaatccgacaaaccatcctaatcccatatcagtcaggcgggttccggttttcccgtagagcgtgtaatgatcgccttcctcttgaatcatcatgcgcttgacgattttcatcaccggcttgtcaaatggaagctcctctttagccagtttctccaaaaaagtttcttgttccagcggagatattgtgagcgagctttgcagccaaaactggtcgattcccccgctgatatcctcgttgccgtaagatagagtatgaagccatgttttcattctttcctcgccgatatctctcgctaatgcctgataataccagattgcggattcgcgcatggccgagccaagcgtatggtcgcggttccatgattcgaattcacgcttgaccccgtcccatcgtttaacatcgtattcatctcttacagctttgacctgcaaaccgattaaagcgttcacgactttaaaggtggattgcggagtttgtctttgatttgcccgttttctgttatagacaaatgtctgatccttttgtaaatcgtgaagaatgaaggttccatccgtatccttgaattcatcatcgacattcattttgctgacattcaagtgtttttcatgagcagatgatgctgcgtggacggagaagccgccgatccctgcaatactcagcacaagcacaacatatatccattttttcattttgttctccccttcgttttgattaactaccttttctctctttcgtttgttcttcctttaaaaaataatcaaaaagcgcttaaatttggttttgcaaacaaatactgttactgggtttatagtcggaagataacgtgaaaatagagggtaaaaaggaaggcagggtaagcggatgaatgagcagattccacatgacaaaagtctcgataacagtctgacactgctgaaggaagggtatttatttattaaaaacagaacagagcgctacaattcagatctgtttcaggcccgtttgttgggaaaaaactttatttgcatgactggcgctgaggcggcgaaggtgttttatgatacggatcgattccagcggcagaacgctttgcctaagcgggtgcagaaatcgctgtttggtgttaatgcgattcagggaatggatggcagcgcgcatatccatcggaagatgctttttctgtcattgatgacaccgccgcatcaaaaacgtttggctgagttgatgacagaggagtggaaagcagcagtcacaagatgggagaaggcagatgaggttgtgttatttgaagaagcaaaagaaatcctgtgccgggtagcgtgctattgggcaggtgttccgttgaaggaaacggaagtcaaagagagagcggatgacttcattgacatggtcgacgcgttcggtgctgtgggaccgcggcattggaaaggaagaagagcaaggccgcgtgcggaagagtggattgaagtcatgattgaagatgctcgtgccggcttgctgaaaacgacttccggaacagcgctgcatgaaatggcttttcacacacaagaagatggaagccagctggattcccgcatggcagccattgagctgattaatgtactgcggcctattgtcgccatttcttactttctggtgttttcagctttggcgcttcatgagcatccgaagtataaggaatggctgcggtctggaaacagccgggaaagagaaatgtttgtgcaggaggtccgcagatattatccgttcggcccgtttttaggggcgcttgtcaaaaaagattttgtatggaataactgtgagtttaagaagggcacatcggtgctgcttgatttatatggaacgaaccacgaccctcgtctatgggatcatcccgatgaattccggccggaacgatttgcggagcgggaagaaaatctgtttgatatgattcctcaaggcggggggcacgccgagaaaggccaccgctgtccaggggaaggcattacaattgaagtcatgaaagcgagcctggatttcctcgtccatcagattgaatacgatgttccggaacaatcactgcattacagtctcgccagaatgccatcattgcctgaaagcggcttcgtaatgagcggaatcagacgaaaaagttaaattaaaaagctctcttcctttatcgaagagagctttttgattacttctttttttcatcgtagtattggacgggatacatggagccttctgataccattttgttgtcctcgatatcttgcgggtccgggtggccggctttatcaactgggaacgtttccatgtctggctgttttgttattttcatcttcatgctgtgaatgaattctcttgccttttggcgatttgacgggtcttttaatagataagaagtgatgccgacagttgaaacagcgagacctgaaagtaacagcttttgtttcatggtgatactcctttctattttaagaatagtgtttcctgtatcattcccgttttggaaattgctaaacctgttgtgtttttatcattggaattaacagtaaattccatttaagaagaaactagtgacttcattcctgtattggaaggtaatatacattgacttattatagatttcagtcaaaattcgataaatattgacaaagtaaagtaatcagaataataatataattagcaagagaatgtcatcatacatgaaaggtgtttacgatatgaatcaattgcatcgaagaatgggaacgttttccctcatgatggtcgggctcgggtcgatgatcggttcaggctggctgttcggggcttggcgtgcggctcaaatagcaggaccagctgctattatttcatgggttattggaatggtcgtcattttatttattgctctttcttatagtgaactaggttctatgttccctgaagcggggggaatggtcaaatacacgcaatattcacacggttcgtttatcggttttattgcgggctgggccaactggattgcgattgtgtccgtcattccggttgaagcggtggcctccgttcaatatatgagttcttggccttgggaatgggcgaaatggacaagcggtttggtgaagaatggaacgctgactggggaaggactagcgtttgcctctgtattgcttctcatttattttctgctgaactactggacagtcaatctattttcgaaagcgaattcattaattacgatttttaaaattattattccgggtcttacgattggagctttgctgtttgtcggattccacggagaaaactttactggcggtcaaagcattgcgccgaatggctgggcaagtgtgctgacggcggttgccacttccggtatcgtttttgcgtttaatggtttccaaagcccgattaatatggcgggtgaagcaaaaaatccggggaaatcaatcccgattgcggttgttggctctctttttgttgcgacagtgatttatgtcctgctgcagatcgccttcattggagctgtgaatccttctgatattgctcacggctggagccatctgaattttaattctccttttgctgatctggcgattgcgctgaatattaactggcttgttattgtgttatatgcagatgcatttgtatcaccgtctggaacggggattacgtatacggcgacaacgtcccgaatgatttacggaatggaaaaaaacaaatacatgccgagtatattcgggaagcttcatccgatttacggcgttccgcgacaagcaatgttctttaacttgattgtttcgttcatctttttgttcctgttcagaggatggggcgtattagcggaaattatttctgttgctacgttaatttcttatatcaccggcccgatcacagtgatgacattgagacggacggggaaagacctgtacaggcctcttcgtttaaaaggcttaaatgtgattgctccgcttggatttatctttgcgtcactggtgctgtattgggcgcgctggccgttaacaggacaggttctgtttattatcctgatcggtcttccgatttatttctattatcaggcgaaggcgaaatggaaagggtttggccggaactttaaagccggcgtctggatggtgttttatctgctggccatgatggttatttcttatttgggcagtgataaattcggcggcctgaatgtcattcattatggctgggatatggttctgattgcgatggtatcccttgtattctatgtgtgggcgctgaagagcggctaccagacagaatacttaaaggatgcgaaagagataaattctcagctgcttaatggacagtcagaagctgctgccggaaaagaataaaatatagaagaaaaccttgcgatagttgtcgcaaggttttttgcttttaataacccttttttactttgtggaaaagatcaggatagttggtgaacactcctgttacgccccaatcaagcaggcgatgcatatcagcttcattattgactgtgtaaggatgaagcaggaggccgtggctgcggatcatacggacgttttcttgatttaaagctttataatccgggcccgcaccgacagcgtatgttttgatttcttccagggcagcatctgtcattgacgccatttgtttggcttccagcaattgaacggtcggcaggtttggctgtaattgatggacttttaccaggctttctttgctgaacgattgaatgatcacctggcctggcttagaatgctttcccagtaatttatgtttctgcaaagaagcgatcagtttttcttccatacctgggtaggtgtcaggcgattttgtttcaatgtagtagttcgcgtgctttccgaaacggtctaatacctcttctaatgtaggaactttaaggccgacgtactgcggctttgctttttccggataggcttcattaaaccaagaaccggcgtcaagcttcttaatgtctgcgagcgtatggtctttcacccaacccattccgtttgtggtgcggtccagtttttcgtcatgcatgacaatcaattttccgtcttttgtcatttgcagatccaattcaataaaatcagctttcattttctgagcggtttcgtaagacagaatcgtgtgctcaggcacatatccagaagcccctctgtgcgcgacggtcaggatacggtcaggtgacagcaggtttccttttgacgctgccgacactggcgttaccataaatgagagtaagcccagcgacagaacaaacaaggccagtattctattttttctcatgatttctcctccttatagataagcactacctgtctttcataataaaaaacggatgtaaacggcgtgttggaaaactattaatcttttatgtgtctttcttaaacatgctctgcccgttttcctgtattccacgtcaaagccaagaagacgatggcaagaatgcaggatgagatcagcatgataaagccgccgttccagttaaaacggtccacgacaaagcccataatggcgtttgcgaaggcggatccgccgatgtatccgaaaaatccggtcaaaccggctgcagttccggctgcttttttcggtgctaggtcaattgcttgaaggccgatcagcataacaggtccgtagattaagaagccaatgctgatcagggcgatattgtccacgagcggattgccggccggattcagccagtacaccaatacggcaatgaaaacacccgccataaacaaaacgcctgccggtgcccggcggcttttgaagaatcggtcactgatccagccgcacaagatcgttcccggtatgcctgcgtattcgtaaagaaaatacgaccagcgtgagtcttcaggagaaaagcctttggcttctgttaagtaagtaggcgcccagtcaaccacgccgtatcgcacgaaataaacaaatacattggcaaaagcgatgtaccaaagaaatttgttgttcagcacatattgaaaaagaatttcttttgttgttaattctttttcctgatttttaaaagcgtgttttggatagtcattccgatactcttcaattggcgggagtccgcaggattgaggcgtatcacgaaccaataaaacaattaaaaatgaaatgataatggcgatgatggcagggaagaaaaacacgcttttccaagtgacgaacatcgcgatcccaagagtgacaagcggagcaagaataccgccgcctatgttatgggcgacattccagatcgacatttttgtgccgcgttcacttatggagaaccaatgggccatcgtcctgccgcatggcggccagcccattccttgaaaccatccgttgataaacataaaaataaacatgatggtgacgctcgaagtcacccaaggcattgaaacgaatagaatattaacgattgctgataaaaataggcctgtcgccagaaaatatctcggattacagcggtcagacaccattcccatgatgaatttgctgaagccgtacgcaatggacacagcggccagcaccaaacccagttctgttttcgaaaatccctgttcctgcagataaggaatggcaaaggcaaagtttttccgcagcaggtagtagcctgcgtagccaatgaaaataccaatgaatacttgcagtctgagccgtttgtatgccgcatccatctttgaatcatccagtctctcaatatgaggagccggtttaaatatattaagcattaataattatccccctttgctgtttgtgctggatgtgtggcgtgcctcctttcccgaaaaacaaaaagagccagaaaacaccccttgtcaaaaggggttggattcctggctctcctcatctccatccaagctattaacttatcatgatagcgctttcttaaattatcatagtccggagcgaatgtaaacgggtaattttcaaattgggccttagggaagtgaatattatccttttactaaatgcaattatatttttttactagtaacataaaaatctggagggaggctgtttaaagatggatgaattagatatcgcattctttattttaccgttaggaattatgctgctatcgattgtcgggacctgtatttgtaaaaacccgtatctgatgccaatgcttagtttggtgatttctcttgtgctcacctttaccatttttaatcaatcatttttgggatgggctgttgtctatagcttggtttctctggctttatcctatatcacattgattgtggtaaggaaaaggaaggaatcaggaaattaaaaagacctcactttctaacatatcgttgactaaagcaactatatgtgattataattgctttagtcaacgatattagaaagtgggaattgatttgaaaacaagagaatcatctgtcgggttaaaattcagaaagttcaatcgattttatacaaacgtccttggtttccttaatgagcacatttacgacagcccgttttccttaacagaaacacggattttatttgagatttataatacgcctaattgtacggcaaaagctcttcaggataagctggggcttgaccggggatatgtcagcaggattgtgaagcagtttgaaaaagaagatttgatttataaacagaggagcaaagatgacgcccgccaccattacatttttgtcacagaaacaggaaaaacgatttataaaaagctggaggagaaagccaacgaacaagtagaactgatgctgaaggtaatcaaccaaaaggagcagcacaagcttgccgaggcgatggcagagattgaagcgatcctttcacagtcgctttctgccagagcatcagagatatcgattagagattattttctttcggaggatcttcaactccttattgagaaacaaagacaattttacgcggaggctcacggttgggatgacacgtttttagcttatcttcaggagacatttgacgctgacatcgaaaaaatatggattgcggaaagcggcgggaaatttgccggctctgtcgggttggtcaagcacgatgaaaagacagtccagctcagatggtttctggttgatgcggattttcggggcagggggcttggcacgcaattgctggagcatctggttgcatactgccaagacatgaagtttgaccgcattttcctttggacggtgagcacgatggctgaggctcgtccgctctataaaaaatttggattcaggataagtgaagtaaaacaagaagcgccattatggggacagcagctgacagaagaacggtgggatttggagctgtcatgaaaagactgcattatgcgtggatcatcgtctccgtcacctttttgatcttattggcggttcagggggtgcggctgtcgtttggtgcgtttgtggagccgtgggaacggcagttttcaatcgatagaagcaccatctcgctgatttcgacggtgagttttattgtttatggcatatcacagcctgtgatcggtcggcttgtggacaaatggggtgcccgggctgttttggcatggagtgcgttactgacaggagtcagcattttcttaacataccttgtgacttcgccttggcagctgtttttgctttacgggctgggtgtctcgcttggagtgggcggagcatcgaatgtggcggcaagtgtattggtcgtcaattggttcagcaaaaagcggggactagcctttgggatcatggaagcaggctttggcgcggggcaaatgcttctcgttcccggctcactcatgttgatccattggtttagctggaagctgacggttgtggtgttgggactgctgttaatcgtgattgtctttccggctgcgctgctgatgctgcggaacaatccttcagaaaagaatacagagccgataggcggactggctgcatcagaaaaagaaacagcacccaaaacaacagctctttcagtggccgggatgtttcgtatgaggcaattctggttcttgatttttccgtttttgatctgtggatttacgaccgtggggctgatggatacccatttgattccgttttctcatgatcatggcttttcaacgacagtcacgagtgctgctgtcagtctgctagcaggctttaatattgctgggatcttgctgtccggaattgtagcggaccggtggagcagccggaaaatcctgtgcattttatatgcggtgcgggcgctgtcgatcgtgattcttatttacagccacgagccctacttgcttttagcctttgcgattctgtttggattagtggactttgcaacggtagcaccgactcaaatgctcgccacccagtactttcaaaactactcgatcggcctcatgattggctggctgtcactcgcccatcagatcggatcggcactaggtgcgtatgtgcccggcgtcatctacacggtaacgggtgagtatacactggctttttatttgtcgattggaatgctcgtgcttgcgagcgtaatgaatgtgatgctgagggagccagctgcggttacgcgtgacagtgcggctgtggtagacaagtgatgaggacaaagggaaagcatctctgatttcgagattattcagagatgctttttttgtatttttgttctaatacgaagtcgatcataccgactatgcgggcgttttcggatttttgtttgaagcgttcagaaatttgaacttttcttgaaaatggggaaacaataaaaacccaaaaaaggccgatcaaggcaaaaaacatttgtacagctaattctattaattcattaaaacgagtgctgaaaaaatagaagtataacgttattaatgtcacagtacatacgattttggcaagtgtgtttgaatgtaagcaatggttcactaaagaatacctttaattgattcagcatgattgaatcatatttgtttaggaaaataagaagttctttatcatcttttttatgttctaaaataaagttgctgtttctgtttctttatatgtatggtggtctacattcaatatatacatctcttaaagtataaaaattgagtatttcttagtaaggatgaaacaaaattacatgatttttttgttatatctttcagttagaataaaatctataactcctctcattcgcaaatattcggctctctgtgcaaagtgcagaacagtatgtaattgtccttttctagatatatttaaaagctttatcaaatcaataaggattttcaagaaaataattaataatagaaagataaaaatgtgtggtatgtcaatgtaattgatttgtcctgaaaataaagaagttgcatagacaacaataatacttccgcaaaacatcaaactcatataatgtggaagggaaaatggacgagttgaaaaatatgcttttaattggcttagcatagcattatctcttgtatctaagtagcccaaaagctctttatcatttttactaattgtaagaacatgattcaatacagcactaaaattcattgaatcttcattatcagaggcagtatgtttattagcctgtatgttttgttgatccattttatattttttataaagtattgtattaattaacttgtttttctcatagaattcagatcgttgattaagggatgcttttcctttgtttttatttcctttttttatgattttagtataagtcataaaaatacaaatgactgtaaaaatagaaaacactgcaggtgaaatatctgaaagaatagtattggtgaagacttcttttgcttggatgaaaaggaaagaagctaaagtcatagatataaacatgcataaaactgctactttcacaagaaactgaagcggaagagaaggttccgaataatagtgcttcaactggttgagtgtcagagaatcttggcgaaaaagataatctattatctcctgctgattttgcatctgattgatatcatgagcgatgttttttgttttttcaaaaactatttgatcatttttcatttttgataaacctccaaaagacgatagataaactaaaaaaactgcatgagcatattttaacttatgttcatgcagttttgtattaaagttagctagtataataagcaaaaatggccagtaacatagcagataatgcggtagcgactttgactcctttattgttcgttaaatcactgcccatattcccaattagtaaaagtgcagcaacacctacaacagggaataaatattgatcataagacggccaatctaacgctaattcactctcgggagacgtaactggtactcccttgtacgtctttattttaaacgtaatcgtagtcgttagtccagttgtgacattgtcaccgactggaatatcaggtgtatagattttaatttgaatgtttaaagattcagctgttggatttacataaacctccaaataaccgttgcgtactgataagctcagactatttaaaaggttttgataagagtcgatttgtgacgcagtgagagacgtttgagtgtcgcccaataaacccgtgatataggcacctggtttaccatttgtaatggtaattgtgtttggtgaaccttcacttggtatggttgccagaagtgaagttgatagaataatatccaactcaggtgatgtgaaaatggtttctgtcgtatcaaattcaaacatcgcgtttgccagacttgttagattttctaaagctggaatggtagataaaatgtctgtcagtgtacgcagtcttgcatcatataccggatcagacggcggatttacattgcttgcacctgagtctcttcctgaatacccgtctttatcaatcccgatgcttccagagccgcttccgatggttccttcataaaattgatcaaaggcccagttgtttggcatcggatagccgagattgccgctaaatcctgttgacatatttgccacaaaactatactttgtcagtcctgcttcagatgtacggatacaaatgtttcttggtccgtaaacccctatttcatacttaggtgcggttgaaaatgtctgcatttttgtaaatgctgacttaatctcttggaaataaggaatgattttatcggtcacttcataatcgtatgcatcaaaatcgacagcgaaataaatggtcgtgcctgacggaaaacctaatcttctagcagcagaagcggcactatatgcatctcttgtgccttggtctttgacaaaataagaagattcatagccgccgtcttgataaattgggaaaaccttcaatccggcatcaagaataactgcaagctctttagatgtcagggctttagatgtgaggccgctgcttgtccgcacatttccggtcaaatatctgccaaccgttttataaccgttattccgcagtgtttgagctttttctgcggttataattgtagcagtgtcacaagcagaagcggtgcgagttgtgtctcctgagcttgataataaagctttaatggttggcatatctgcataacctgtttgcggcaggcacatgaactcttgaaatgctttaacagctgaaacaacacccacaccatatttgccgtcaaactcaccaggatcgaacgattttccgttacaatagagggcgtactgaacaattaagacaaatcctgttcttgaatcgccgggagttaaagtagggcacaaacttgtggtgccgtttccgaaaaatccattggcaacacttgtgctcatgccttcttctttttgcagggcataaataagagctttatttgtatcgcggccatacagtccgtcacaaggcattaacccgatatagtcattgtagtctcgatttaagttttgttgaatctggcgaattcttgaatcacccccagacaccagcttaaaagcgctcatgtctaataaggctttcataattaacgtggtgacaatcccatcctgtgttgtcagtccggcagctttttgaaattcttttaccgcattttctgttttttcgtaaaagacgcctgtaaaaccgccgggattaaagcctttacaccataaagccccttgtaaaataaaattcatgttgcttggttttgaatctggagcttggcgtttaagaggcttaaataagcgctgtgttgtcggcccgaagttatcggctggctctgagatacccaattcaatttgaagcgcccgagtcagaccgtagatcgtatcccacccagttttcccgctttcttcaactgggttatacccatgtttgccgctgtacgtatcgttcagccattgctgtgtgattaagaccatttcatcaaccatttcgattcctcctttgttagattgcgttcatttataggtggcaaacgtaggacaaaataaaaaaatggatgccgttaagcatccattttacatccgttctccaacagcttcgctttcggtttcagctctgaaatgtagaggcctaaaagtgtaagcgcgcctcctagaagagcgatccatgtcatgttttcgtgcagaatcaggacagaagcggcgatcgtgataaccgggaccatgtaaatatacgcactggatttgacggctccgagcactccaactgaataattccaagtggcgaagcacagggcagaagcgccaatccctaagaaaagcatgttgagtatatttgaagcagatgaaaatcggcttaggtcaaaatggaagtcgaacaaaaataaagcgggaaccataaacaataaaccatacaaaaatactctctgtgtcagctcgatgatgtggtattcgtaggcgcttaattttttcatgaatatcgagtatccgccaaacacgagagcagccccggctgccatgatgtctccgagcggatttagacgcagtaccacattgccgttaaacgtaatcaataaaagcccgatcagtgccgagataaatccaatcaaaaaagtcagacgcaatttttcgccttcgagcagaaaatgggccaaaaccgcagtgatcatcggtataatggacacgatcatgccgacattggaggcgtatgtataggtgagagctatattttctaatagaaagtataaggttacgccaaataaaccagctccggcaaacaacagctcctgccgccaatttctgaacggaatcatgttgggacggacgaggataagagcgataaagcccatcaaaaaccgataaaataatatttccattggagagaagtcagccagcagaacttttgtcgaaataaaggtcgtcccccaaatcagaatggtcacaatggctgcgatatgccccgaagtttctctttgtatgttcatctgtgaagctccttttcaaaaatcttcatgtattgcttcggcgtcagccccacctgccgtttaaaaaacttcgtcatatgactctgatcgctgaatcctgtctgaaatgccgcatcaatcggccttaccccttgttcaaggagttttttggcttgattaatccggattgtttccatgtagctattaggggtaatgcctttttgttttgtaaatgaacgcaataaatgatacttgctccagcctgttaattcactcaaatcattgagtgtaacattttcggcataatgctcttctaaaaattcacaaaccattttgacttcgtctgatggttctggaacgctgctaaggaacgtgacatctgaataatggcggatcagctcctctaatagatgaagaaacagctcctccttacgcaaagcttgtttttcctcggatatcaaaatatgcaattcctgcaggctggctgtcagctcatggcggaataacacatgctgggagaaataagggagatgcccggagccagtaatctctttcaccgccttctccatgatatccggcatgacattgatacaccgataatcaagcgtccggccgtcaatctgttcacagctatgcgtgtcacgggggttaaagaggagaagatcacctggattgatgatatattcttgatcctgacaggccagataccgttgccctttttcaataaatccaatcacataataatcgtgaaagtggttcgggaacttctgcataattcccttgaagcggtaggcttctatatgaaggtgtgggtcaagctgcagtgtgcgggtttcgttttgcatgggatgcctcctgtcggtgtggtggtcttggattaagtgtagcatgattttgggggatttcttgtatgatgttgctgtttaggaatagagaaagcagaccgttatttgtctgctttcgtttaagaatttaaaagattttaaccctcaataataattttatcttttttaataaaaatttatttttcaaatatttcagttataatggtttggaacagataggaggggcaaagatgtatcaatcaaagaaggttttattgttaggttcaggtgaattaggtaaagaggtagtgattgaagcccagcgtcttggggtacagacggtggcagttgacagttacgagcatgctccggcgatgcaggtcgcgcataacagttatgtcgttgatatgctggacccagagcagatcagaaccatcattgagaaagaaaatccggatttgattgtgcctgaggttgaggcgattgcgacggatgaattgctgaagcttgaagaggaaggatttcacgttatcccgaatgcccgtgcggccaagctgacgatggatcgggaaggcatcagacgacttgcggcggaaacgcttggacttgcgacagctggctatgaatttgcgaatacatatgatgaatttatacaagcggcagctcagatcggttttccttgtgtcgttaaaccattgatgagttcttctggaaaaggccaaagtgtgtgccgctctgaagcggatttagagagctgctgggagacggcgatggaaggcggacgggtgaaaaacggccgcgtgatcgttgaggagtttatccctttcgaatcagaaatcacactcttaaccgtacgtgcggttaacggtacggcattttgtgagccgatcggtcatgtgcaaaaggacggggattatatcgaatcgtggcagccgcatgatatgacagagcagcaaatagaagaagcgaagcatattgcgaaaacgatcacggatgagcttggcggatacggcctgtttggtgttgagctgttccttgcgaaagatagggtatatttcagtgaggtatctcctcgtccgcatgatacgggtcttgtcacgctggtgacgcaaaatttgtcagaatttgcgctgcatgtccgggcgattctcggctttccgattacagaaatcacacagctttctcctggcgccagcaggcccctcaaagcgccggaagaattagcggattacactgttgaaggattggaaaacgcactggcagtcccaaagactcaagtgcgcgtctttggaaagccgataacaaaagccggacgtcgtatggcagttgcgctttctgctgctgattcagttgaaacggcaagagagaatgcaaagaaagcgttggaccagctaattttaaaatagagtttgaacaggtcttgtcatgggacaaggcctgtttttttctttctccgtaaaagttttatcataagaatcagaaacctgattataatgtaaaagtcttccatcgatacgggtggttgacactaaaggagggagatgacaaaatgaaattagttccaagattcagaaaacaatggttcgcttacttaacggttttgtgtttggctttggcagcagcggtttcttttggcgtaccggcaaaagcggcagagaacccgcaaacttctgtatcgaataccggtaaagaagctgatgctacgaaaaaccaaacgtcaaaagcagatcaggtttccgccccttatgagggaaccggaaaaacaagtaaatcgttatacggcggccaaacggaactggaaaaaaacattcaaaccttacagccttcgagcattatcggaactgatgaacgcaccagaatctccagcacgacatcttttccatatagagcaaccgttcaactgtcaatcaagtatcccaacacttcaagcacttatggatgtaccggatttttagtcaatccaaatacagtcgtcacggctggacattgtgtgtacagccaggatcatggatgggcttcgacgataaccgccgcgccgggccgcaatggttcgtcatatccgtacggtacttattcaggcacgatgttttactccgtcaaaggatggacggaaagcaaagacaccaactatgattacggagctattaaattaaacggttctcctggaaacacggttggctggtacggctaccggactacaaacagcagcagtcccgtgggcctttcctcgtcagtgacaggattcccatgtgacaaaacctttggcacgatgtggtctgatacaaagccgattcgctccgctgaaacgtataagctgacctatacaaccgatacgtacggctgccaaagcggctcgcctgtttatcgaaactacagtgatacagggcagacagctattgccattcacacgaacggaggatcgtcatataacttgggaacaagggtgacgaacgatgtattcaacaatattcaatattgggcaaatcaataaatacagcaaactagccatattcatgtctattttgtttttatgcgggtgcagttcgcagacgcattcttctcaaaaagaaacgactattcctgtcactcttcatgtggaggatgctaaggggctgccggtcgaaggggttcaagtgacgattgtcaaagcgccctcttcagatgaggagccgagtacagagattggcgagatactcggtaaaacagacaaaaacggagatatcaaatgggataccggcagaaaaggcgattactcagtcgcgttgacgaagggtgaaacatcagtaacccatcacatctcgttaacagaggataaaaaagatcatgccattccattagtcttcaaagaatagcagtttccttgattttaagggaactgccttttttatttattgcaggaaaccaaactatatactggaaatttattatgtgagataataagaaataggtattttttcttacgagacaaaaggggcgttatcctttatatcaatcaaacccggaggaaaaagaagaagatgatacaagattcaatgcagtttgccgcggttgaaagtggtctgcgcttttaccaggcatatgatcaaagcctttctttgtggccgattgagtcggaagcattctatgtttctactcgttttggaaaaacacatatcattgcaagtgggccaaaggacgcaccttcgctcattttgcttcacggaggccttttcagctctgcgatgtggtatccgaatatcgcagcgtggagcagtcaatttcgtacatatgcggtcgatataataggagacaaaaataaaagtataccatcagcagccatggaaacgagagctgattttgcagaatggatgaaagatgtctttgattctcttggacttgagacggcacatctggccggcctttcgcttggcgggtcccatatcgtgaatttcttactccgcgcgcctgaaagagtagagcgggcggttgttatcagtcccgctgaagcgtttatttcatttcatccggatgtctataaatacgctgcagagcttacaggggcaagaggagctgaatcatatatcaagtggatcacaggcgacagttatgatctgcatcctttactgcaaagacaaattgtggcgggcgtggaatggcaggatgagcaaaggagcctgaagccgacagaaaacggctttccgtacgtgttcacagaccaggaattgaaatcaatacaagtcccggtacttctgatgttcggtgagcacgaggctatgtaccatcagcaaatggcctttgagcgggcttcggtattggtgccgggaattcaggctgaaatcgtaaagaacgccggacatctgttatctctggagcagccagagtacgtcaatcaacgcgtcttgtcctttttatgcggggggataaaatagtaaggaacatgaaaagattggcattcatttttcaaaaggtaacaaatgttgtataataatagaatttgaatgctgctttttttgggagcattctatgttatcatgcttattggagaaaaatttttcctgtaacgctattcgatcactatcgtcaaataatatagatggttttacaattggaggtttggttacactgtgaattacatcccctgtatgattacgataggaaacttcatttgcggattgctggcgattcattccttgctatatcacaacattcattcagcagtgctttttatttttacaggcatgttccttgatttctttgacgggatggctgctcgtaagctgaatgccgtttctgatatggggagagaactggattcgtttgccgatctggttacgtttggggtggctccttctatgcttgcttacagtgtcgcgttgtataccctgccatttatcgggatcttatgcgcattgacgtacagcatttgcggaatgcttcgcctctctaaatttaacattgaacaaagcaagctcccgacgtttatcggtatgccgattccgtttgcgggcatgtgtctcgttattctaagcttcacctataacccgatccttctggcaatcggcacttgcggactctcatatttgatggtgagtaaaataaaattccctcattttaaaaaacatgcggcagaaaacctggagtctgggagatggaattagttcagcagctcatagcggattacggttatctcgctatttttttgatgctggtattaggaattgtaggattgccgattccagatgaagtgatgatgaccgttgttggctatttcacgcataccgatgtattgaattatgagctttcgatattgattagttttgtcggggctttgttaggtatgctgatcagctacatgattggcagaaaagccggacgcccgtttatcgacaagtacggcaagtgggtcggcttaaaagaaaaaagaatgatgaaagtggaaaaatggatgaagaaatacggtccatattctcttattttaggttattttattcccggcgtcagacatgtgacgtgctacttttcggggatcggcaaaatggatctgaaaacgtatgttgcgtttgctgcaatcggcgcctttttatggtgctttgtttttattacaatcggaagggttatagggattattcatgtttaatacggctgtaaagattctgtatcgatcattgatagagctgacgaatcatcgtctgtcatcctatctgattaaaggattttgcgagtcgaaaatcagcaaaccggtcattccgcttttctcaaaacattttcggctgaattgggatgatgtggacggtacggctgctgattacggatcgctgtccgaattgttcattcgacaaataaatctggagcggcgccctgtgtcaaaagaggcgcatgcggtggtcagccctgttgacggtgtggttcagacggtaggaatcatcaacccgaatcaaacctttacggtgaagggaaaagattactcattcgctgagctgaccggctgtaaaagcgcagaccatcaatacaacggcggatatttcgtcgtgctgtatttaagcccgaggcattatcaccgtttccattctccgatcagctgcaggtatcaaaagctggccgagctcggaaatcgctcatacccggtaaatcaactaggcttaaaatacgggaaagatgtgctgtcgaaaaattatcggtttgtgtacgagctgaatagcggcagccgaaatgtcctgatgattcctgtcggcgcgatgaatattaattctatcgtgcagacgaatacccgtactgaattggagatcggcgaggagctgggatacttttcatttggctcaaccgtcattttggtttttgaaaaagacgcgttccagccgtccgcccatttagcagaaggccaagaagtccaagtcggagaactgataggttacgaagaataaaaagaggagcttgcataaacgcagcgcctctttttttgaagaaaggtgagattcatggagaaacaaatcatcagctggattacagattatcagaacaccggagatgaagccgtcctgcggcaagtgcgagaagtgtgctggccgatcgttgaagcggttttgcaagagaaagtaatggatgatgaacaagcgaacaatttgcgcgaaaaaggaatcgagcggtttccattcatcatcagcaaataccaagcggatgtgcagcttccggttgagacatttttacaaaatacgtatcggttttactttcatcaggtgatgagagaatccagctaaagcttctttcaacagagaagcttttttttgttggcaggaaaaggaaactttttctatatctatctcgtaatgactagagaacctagcagaaaaggagagatagaattgaaacgaatgatagtgagaatgaccctgccgctgctgatcgtttgtctggcgttttcttctttttcagcctcagcccgtgctgcttctgaagaaaaatattgggatcactggattgaacgacatgcacagcctctggatgcttccaatgcttcaaacaaagaccttcgatttctaaaaaaggtgctgaagggaaaacgaatcgttcagttaggagaaaccacacacggtgctggcgaaatcaatgccacaaaggtcagaatgatcaaatacctccacgaagagctgggatacgatgtattggcctttgaatccggctttcctgatacaaatgcatcctaccttaatatggaccaattaacccctaaaagcacgatgaaaaactccatttacgctgtatggcacacagaagatgtcgtcgaattgtttgattacatgaaagagcaaaaagagaaaggcgatccgctgatccttaccggttttgatattcaaagcatgaagaattcattcaatgtagctgcgactcaatgggtaaaagcggtggaccctgagaaagcagagttgctctcccaatcagaaaatgatttttcaacattagtgacagacagcaatacgtttgatgaattttcgcaaaagaaggaaaagcttgtgaaaaactatcagaagctgatcaagttcactaaaacacatgcttcagagctaaaagaaaaccttccaaaagagccgaaagcttatgagatgtttatgcattctcttcagctgagaattgacgtaatggaaacatatatgctggaagaaatgaaagaaaaactagaggagtatccggagaatattgaggatttttcattctttatgagagaccgcatgatggctgaacaatttcagtgggtagccgacaccctttatccgaaaaagaaaatcattgtctggggccacaattaccatctacgcaaacagaatacgaagatgataaaggactgggtacagctaaacggccctaacatgggtgattatttgccggagcggctgaaaaaacaaacatatacgattggcatttatgcttactcaggtgcgagtcttgatagctccgataataagactgttaagccggttacaagcccgccgccgtctgggagccttgaagctttgctgaaagcggcggaccgaccggctgtttttgttgattttctccatacaaaaaacaagaaaggcacttcgtggatgtataccccgcggactgcgctctattgggggtacatggaagagcagatgatcctgaaggaacaacttgacggtgtcatttggctggagcatatcacgccctctgtcattatcaagtgagcggtgtcccctgtggtaaacaggggatttttacatatcgcaaaaataatcaaaacatataatccgtgatccattattctaaaacagaaaggagattggagcgtgcaatgtattatgaaaaagctgtccagaaaacaatcaattggattgaatcacatttacatgagcaaatatcaaacgaggatattgttaacgtttcaagcttttcaaaattccattttcatcggatttttcaaaaagaagtcggcatgtcggttgcttcttatattcggttaagacgtcttgcgaatgcggcggcagctttgctttatacagatcatcgtattatcgatattgctttgtattatcagtttgaatctcaagaagcatttacgaggacgttcaaaaagatgtatcacatgccgccaggagcataccgaacatttatgaaacgctttacttcaaaaaaggaggaatcttacatggagaaaaaaatgaaaggctgggtattgagcgggagccatccgttccaattcgaaatggggattgaccgggaaaatgtacatcagggaaaagcttcagggtatttaaagtcaacgatggttcaggatatcggtgaatttgcgacgatgatgcagcaattcaaagcagatcgctatctaggaaaaaggcttcgtctatcaagttttatcaaaacaaagggggtgcagcattttgcctcactttggatgcgggttgacagtgctgctgatgatgttctccaatttgataatatgagcaacagacctattaccggaacaaccaattggaatcattatgctatcgttttagatgtcccagaaaatagcgctgtgatatcttttggcgttcaattatctgggccgggtcaggtgtggatggatcatgttgtttttgaagaggtagatgagagcgttccttcaacaaaccttgaaatgccgggagaacttttagatgaaccggtaaatttatcttttgaagaggaactacaaaaatagttttcagacaactacttttattagtgagttaatggaaaatactatttgttattaataaacccttgtgctgcttaggtttgtaagagcttggatatttttatcagtctgggcggatctgttcatctttgcggcattttcctgtatgatatagtaagagtgtgcatagcaactaactataattgaacagggtgtttaaaacatggaaaaacaatacagagtattactttactataaatatgttccgattgaagatccagaggcgtttagagagcagcatctggctttttgtaaggagcttggtttgttaggccgtatccttgtttcttctgaaggaattaacggtacggtatcaggtacggttgaacagactgaaaaatatatggaaacaatgaaagctgatcctcgctttgcggacatggtatttaaaattgatgaagcagaaggccatgccttcaaaaaaatcttcgtccgccataaaaaagagcttgtaacgcttcgtcttgaagatgatgtcgatccgaacgaaacaacaggccagcatttgaagcctgcagaattttatgagaagatgcaggatccaaacacaattgtcatcgacgcgcgtaacgattacgagtatgaccttggccatttcagaggtgcggtccgtcctgacatcgaagccttccgtgaattacctgaatggattgaagagcacaaagatatgcttgaaggcaaaaagattttaacgtactgtacaggcggcgtgcgctgtgaaaagttctcaggatggctggtgaagcaaggctttgaagatgtagctcagcttgatggcggaatcgtgacatacggaaaagatccagaggtgcaaggcaagctttgggacggccagtgctacgtatttgatgaaagaatcagcgtgcctgtcaaccgtgtcgagcatgtgattgtcggcaaggactactttacaggagaaccgtgtgagcgttatgtgaactgcgcaaatccatcttgcaataaaaaaatgatatgcacaccggaaaatgagtataaatatatgcgcagctgcagccacgaatgccgcacgaacccaagaaacctgtatgtgaaagagcataatatgacagaagaagaagtaaacgcaagactggcagcgattgaaacagaagatcacgctgctgctgaataaaaaaagaacacctcgtattgaggtgttctttttttctatatgctttcagtttggctgtttgcggaaacccattctttttggcggaaggccttttcccattttgataccacgatacaggcgatcgcatgtcccggtacgttcacgcctgttctcgccatgtccatgacgcggtcaacacccgcgataatggcaacgccttcagccggcagtcctacagcattggcagtcgccagaagaactacaagcgatcctgagggtacagctgcaatgcctttactggtcatcacaagcacaagcatcatgagcagctgctgggacaatgtcatgtctacttgaaaggcctgtgcgagaaagatacaagaaaccgataaatataagctggagccgtcacagttcaatgacaagccggagggaacgacaaatgataccactcgtttgggacagccgtatttctccattctatccatcagctgagggagaatggtttcagtgcttgtggtggaaaatgcaattaaaaacagatcccatatcattttcaatacttcgaaatacttaatctgaaagatgagaccgacaagcggaaagaggacaaagaggatcaggaacaggccaaggaatacggtgccaaccagcttaaacatagggaggaggagttcaatgccatattggcctacagaagcagccatcagggctaacacgccgataggagcagtgaccatgacgatttgcgtgagcttgaacataatctgagctgtagattcaaaaaacttcattactggttcagaagctttgccgataccagctgcggcgacaccaaataaaatggcgaagaaaataacggcaagcaaatcatttctggccatgacatcaataatgtttgtagggataatatccaggatcatttgcttgaaatcaacaactttgtctgtgtagccggaaagttcatgaatatctttttttgccaaatgggagaggtcaagcccgacacctggttttaagacattcgctaataaaagtccaagccctaataccaacgttgtaatcacttcgaaccaaatgatcgtcttgatgccgagactgcccatttttttcatgcttccgcttcctgcggctccaatgacaatggtagaaaatacaatcggcacaacaatcattttaatcaggcggataaatccatctccgacaggcctcagtgccatcccgaaatcaggaaaaaagtggccgatcaccgcgccgacagccaaagcgattaaaatttgaaacgcgattaattttttcaaatgaatccccctttagaacgatagaatgtaggcatattcatatcattcgtgattcaaatgcaaacaccttttttcaagttattttattttgacagcgctttcattatgttggcgaaaaagtcccccgcagcaggggggacttttttacttcatttgaatgtgctttagatcttcttcagaggtatttgtgaaaataaccggtgttatggctgaagcggcatgctgcttgatgtaattgagatcaaaggtgagaagcagttcgccttgtttgacggcttgtccgcttgtgacatgtgcttcaaagccttccccattcagtttgacggtatcgatgccgacatgaatcaggatttcagtgccgccggcgctcataaagccgatggcgtgttttgtcggaaaaatcgagacgatctcgccgtccgcaggtgcaacgacttttccttctgatggtataatcgcaaatccctcgcccatcattttttctgaaaagacctgatcaggcacatcccctaaagagactgtttctcctttaatcggataaataaaggtctcatcggaatcgggcttcagcggtttgtcagttaccgtgtccagcgcggcggcggtggcagggacgcctccggccatgattgttttgatgtcgtcttttaaggcatcggacttggttccgaatattgcctggaagttgttgttgacctccagcacacctactgcaccaagccgttttaattcatccttgcagacttggcttggctgatgaacggtcacacgaagccttgtgatacatgcatccaggttagcgatattttgctgtccgcccaaggcctgcagcacgtgaaaggcaagctggtcttttgcaactggagctttctcctcattctgaccgtcttcatctgtctcacggccgggcgttttcaaattccatttcagaatcgcaaatcggaacaaataataataaatgaaagcaaacacgatcccgacaggaatgacaacccagccgtttgtagacagtccgtagttcaagacgtagtcaattcctccgcctgagaacgtatagccgtggcggacatggaataaatcacaaacgacaaagatgacgccggcaagaatagagttaatcaaatagagcacgggcgcaacgaacaagaaagaaaactcaaccggttctgtaattccggtcagcatagatgtgagcgccgcagaaatcatcacgccggagatcatttttttcttttccggacgcgcggtatggataatggcaagagcaacggccggcagacagaaaatcatgtaagggaaatcccccatcataaagcgcccggctgtcgggtctcccgcgaaaaaccttgtcaggtcgccggttacggtgttgcctgttgatgggtctgtgtattctcccatcataaaatagaaaggcgtataaaaaatatgatgcaggccaaaaggaatcagcaaacgatagatcgttgcataaaagaacaggccgactgttgaatcggcaattaaactgctggctgcgttaattccgttttggatcagcggccaaacgaatgagaaaatgacgccgatcaccaatgaactgacggaagtaatgatcgggacaaagcgttttccagagaaaaatccaaggaccggatgcagctcgattgatgaaaatcgcttatataaataggcggcgagaagcccgataatgattcctccgaaaacccccatatcaatcaggtgctcggctccttcatacggaggctgaaggccgagtaattttcccatattgtcgagggtgacggttaaaattaagtatccgatgacagcggcaagtccggctacaccttctccgccggctaatccgatcgcgacccccacggcgaaaatcagcggaaggttatcgaatacaacgccgcccgcatcctttataatagggatgttcagtaaatccttgtctccgaaacggagcaaaagacctgctgccggcaggacggcaaccggagtcatcaacgcgcggccaagctgctgcagaatttgaaatgcctttttaaacatgacagtctccttttattgtgttatgagaatgatgcactctttaatttttgagctgctttataatcggcgataacggttacatgattgtgtttttgaagaatggaggctggtacatctgtcgtgacaggaccttcagccatcttttgaatggcgtctgctttttcctcgccgcttgctaaaagcacaatatgtttgctgaattccatgatggttttaatgcccattgaaatcgcgagtctcggaaccagcaccggatcgccgccgaagaatctggcatttgcctgtatcgtgctttccgagagcttcacaacacgtgtccggtcttcaaaatcagatcccggttcattaaaaccgatatggccattggcgccgatgccgagaatttggacatcaatgcctcccgcctggcggatgagatcctcgtatactttgcatgccgcctcaagctgcggattgtctccttgcgggatatgaatatgatcaggctgcatattgatatgctgaaaaagatgctcatgcataaaatggttataactttgcggatgagatggagagagaccagcatattcatccaaattaaatgtagtaacctttgaaaaatcaatttcgcctgcctgatagtctgaaatcaactgcttatacaagccgaccggtgtgcttcctgttgccaggccgagaacggcatctttcttagcttgtatttgttctttaataatggcagcgcttaacttacagagttcttcgtagtgctcggcgatcagaatcttcatgtgacaccccctcaaagagatagacaagcaccatatttgttatgaccaatttatgatacttgtcattacgaatttagcaccgcccttatcaaactgtcaatattaatttctgaaaatttgttataaaagaaggatacaaatctttcatattgggagggcaaatggtattatggtctcaatgaaaaagaacggattgcatacagaatggggagaatgaaatgacagctttatattctgttatcaagtttaaaatcattgagttaattaaatcgggcaaatatcaggcgaatgatcagctgccgacggagagtgagttttgcgaacaatatgatgtcagcagaacaactgtgagactggctctgcagcagctagagcttgagggatatattaaaagaattcaaggaaaagggacatttgtatcggcggccaaaatacaaacgccgattccgcataagattacgagctttgcagaacaaatgagaggacttcgttctgaatcaaaagtgcttgagcttgtggtgattcctgccgatcattccatcgccgagcttttgaaaatgaaagagaatgaacctgtcaacaagcttgtcagagtcagatacgccgagggggaacctttgcagtatcatacctcatatattccctggaaggcggcaccggggctggcgcaggaggaatgcaccggctcgctgtttgaattgttaaggacaaaatacaatattgaaatcagcaggggcacggaatcgatcgaaccgattttaacggatgaaacgatcagcggacacttattaaccaatgtcggagcgcctgcgtttttatcagaatcccttacctatgataaaaatgaagaagtggtggaatatgcgcaaattattacacggggagaccgaacgaaattcaccgtagaacagtcatatcattcataaagcaatgtgttttaagaagggaatggtggttctatgtttttatttacgaatggaaaagtgctgtggggagcagtgattgctgcattcatcctttcaattgtattttacccttttctgccgacgcagatgccgattcattatgatgttgcgaacagtccggatctgacggttaacaagctggcggggactgtgatgctgcctgttttgatggtggtgtttgcatgggcgcggaagatcaattggcaatttgtattcgcagtgtatattttgctgatttgccacattgtcgtcctttgtttagcgctctaaatcaaacagccagaataaaactggctgttttctttaatttcagcttcatctgacaatgaatgtggtgtataatagctgatgatcctaaagaatattctgaaatttataggtgtgaagcggcgtattattaaaggaaaggctgtatactttttgcagctttaaaaagactgaatatttaaacaattatgtgaaaggtgtgctgattagattgaataagcttattgaacgagaaaaaactgtatattataaggaaaagcccgacccgtcttccttggggtttggacaatattttacagattatatgtttgtgatggactacgaagaggggattggatggcatcatccgagaattgcgccgtacgcaccgcttacgcttgatccgtcttcatctgtttttcattacggccaggctgtttttgaaggattaaaagcatacagaacagacgacggcagggtgctgctgttccgtccggatcaaaatatcaaacggctgaacagatcgtgtgagcgcatgagcatgccccctttagacgaagagctggtgcttgaggcattgacgcaattagttgagctggagaaagattgggttccaaaggaaaaaggaacgtcactgtatattcgtccttttgtcattgccacagaaccgagtctcggtgtgaaggcatccaggagctatacatttatgatcgtgctttcgcctgtcggctcctattatggcgacgatcagctgaagccggttagaatctatgtcgaagatgagtatgtgagggcggtcaacggaggagtcgggtttgcaaaaacggctggaaactatgccgccagtcttcaggcacagcggaaagcgaatgaactgggctatgaccaggtactgtggctggacgccatcgaaaagaaatatgtggaagaagtagggagcatgaacatctttttcgtcataaacggggaagctgtcacacctgctttaagcggaagcattttaagcggggttacacgtgcgtctgcgattgaattgattcgaagctggggcattccggttcgtgaagagagaatatcgattgatgaggtgtatgcggcctctgcacgcggagaattgacagaggtctttggcacaggcacggcagcagtcgttacgcctgtcggtgaactcaacatccatggaaaaacggtgattgtaggcgacgggcaaatcggggacctctcgaaaaagctgtatgaaacgataacagatattcagcttggcaaggtaaaaggcccgtttaactggacagtggaagtgtgaaaatcgaaaaagaacctgcccggaggcaggttctttttattttgaatgagtcatatcagcagccggctggcttttgcggttttttacataatatattgcatagcaaatggccataaatggaacgccgcaatagagtgcgattctttgattcggatcaaaggcaatgccaacgacggaagccaggcataacaggaacgcagcaatcggcacgaacggatacaaaggggttctgtatttcaaatcagtaaccttgtttcccgcttcgatataacgttttctgaacatgaattgagaagcagcgattcccatccacacgacaacgacggcaaaaccggaaatcgacacgagcacaacgtatacagtgtctggcgcaaatacgctggacagcaacgacagaatgccgccgatcatgctgaacaccagcgcgttaaaaggggttccttttgacgtcagctttgcaaatgtcggatgaagcgttttttcttttgataaagaccacagcatccgggaagaagcgtagagtccggaattagccgctgacaggatcgctgtcaggataacaaagttcatgatatcggctgcgtatggtacaccgactctgtcaaagacagcgacaaacgggcttttgatgacacctgcatcttgaatcggaatcagccctgacagcacaaaaattgttccgacaaagaagagcgagagacgccagaccgttgtttttatcgcttttggtatcgtcttgtcaggatcaacgctttcaccggctgcgattccgattagttccgttcccgaaaaggcaaaattgacggacagcatcgtcatcaaaatcgggacaaatccattgggaaaaagcccgccttccgccgtgaagttggacagcatcggagcggcttctccgcctttgatcgggatgatgccgaacatggcagagccgcctaaaagaataaataatacaatggctaatactttgatgctggaaaaccaaaattctgattcagcgaaaaacttgaccgaaaatgcgttaagcaagaagatgaacagcgcaaagacggcactccacatccaaaccgatgtatgggggaaccagcgctgcattaacaggccggctgctgtgaattctgatcccaatgccacggtccatgtcagccaatacagccaagcgaccgtaaatccggtgcccggccctatgtatttggctgcataggtgtgaaaggcgccggtcacaggcatggcgactgacagctcaccgaggcatagcatgaccagatagacgatgccggccccgactaagtaggcgagtatcgttccggccgggcctgcttgctgaatggtataacctgagcttaaaaacagcccggttccgatgacacctcccaaggaaagcataaagaggtgccggcttttcatacttctctgaaaggttgtctcattcttgttgtgggcagagttcatctttttccaactttctatcagcgatttatttccttcctaataaaaaatctcatgtcagaaagtgacacgagactccggcgaaccggctttaagttagaatatacaaactattccgataagtcaagttgtttttaaagagcgggcccaagccgcaatttcttgaatattttcgggttttgtccggcagcagccgccaatcagcctcgctcctttttcatgccaggtgcgggcgctcgccccgtaagattctgcgcatgctgcgccgttccacgtttttgtttccggatcatattgctcacctgaattcgggtagacaatgatcggttttgacgtgttcttttttaactcctctatcaaggaagggatatgctgaagcggcgtgcagttgatgccgagtgctgcaatttggcggtgttcatcaagccacgatgcgcagtcagctgcaggtgttccgtcactgatatgcaagccgtctttagcactgaagctgatccatgcatacgtttcaggaaattccttcaacagccgaacaatcgctttggcttcagtcagacacggaatcgtttcgcatgccaatacatcagctccggcttcaatcagcgccttcatccgggggcgatgaaattcaatcagttcatcttctgatattgcgtagttgccgcgatactcagacccgtctgcaagataagcgccataagggcctatagaagccgcaatgatcggttttggccgattcaaacggttctcttcaagcgaccaaaattcatcacgtgcttcagctgcgatgctgacggacaactcgatgagccggcgtgcttccgcttcgctcagcccgcgtgcggcaaagccttcaaatgtagactgatagctggcggtgattgcacaatcggcgcctgccgcaaaataatcagtatgaacttgtttaatcagctccggctcttccatcaggatttttgccgaccacagactgtcattcaaattacagcccttgcgttcaagctcggtcgccatggcgccgtctagcacaataagcgggtatgtatctaatatgtgttggataggattcatagaatgtaccgatgccttctttcagatttttttgaaaaagatatgaaaatcgtaatggaggcttacgtgtttgtcaataaacgcaaaaagagaaaggtgttcagcccatatgtctgaacacccttttcttatgatatttgtttgttgtgcgtgtcagtctttgtgtctgaaaccggccagcactcaatgccattatggtttttgagcacatctttataaaagaccggatccttgcctgcttttttctggcgtgtatagtctttcagcgccgtaaaaacgacctttgatagtaagaaaatcgcgattaaattcacgatgaccatcaaacccatgaacaaatcagcaagatcccagacgagctggactttggcaacacagccaaacacgatcattgccagcacgccgatacggtagacaaaaatcagttttttgcttttgttcaaaaagccgatattggtttcgccataataatagtttccaattagagcacagaatccgaataacaaaatcagaatcgcgagaaagcctgatgcccatgatccgacatgggagctgagggaggcttgtgtcaaggcgattccgctcagacccggagtatgataggcatccgaaaacagaatgataaaagcggtgcttgtacaaatgaccagtgtatctgtcagtacaccaaaagcttggatcagcccctgtttgacgggatggcttgttgtggcggtggcagcggcatttggtgcgcttcccattcccgcttcgtttgaaaagattccccgtctgacgccttgcatgagtgccgcgcccaaagccccgccggcggcctggtcaaaaccaaacgcatttttcacgattagcgcaagcacacctggcagctgcgtaatgttggagaaaatgacgaaaaacgcaactccgatatacaggacagccaatacgacgacaatggattcagccagctttgcaatgcgcttgactccgccaaaaataatcgtgccgaatacagcaattaaaatgagtcccaatgtcaggcggtttgtgccaaacgcgttttcaaaggcaaggctgactgtattggattgaaccgagttgaagacgataccgaacgataaggtgattaacacagcgaacagcgcgcccatccaccttttgttcagccctttttccatgtaatacgccggcccgccgcggaagccgtttacatcttttactttataaatctgagccagtgtgctttccacaaagctggatgctgatccgataatggcgataatccacatccagaagattgcaccgggcccgccgagtgcaatggcgatagcaatgcccgtaatatttcccgttccgacacgggccgccatgctgatgcaaaaggcttgaaacggagaaatgctgttttttgaccgggaagcagcaccttctcttaataccctgaccatttctttcagcatgcgaacctgtaaaaacttaagcctgaacgtaaaatagattccaaaagaaaggagcaaaacaattaatagctttgaccacaaaagatcatttgcaataccgacgatatgttctaggatttgctgcatagaatcacctcttttttcatgtttaaaaaatgctgagctcccattcctgcgccatatgcttcagcagcataccgccagtgaggctgttgccgtattcatcaatggcaggcccgtaaatgccgatgccgcatccggattgaaaaggctgttctcttctggcgcttggaggcaccagcgccatgatgccgccggagacgccgcttttggccggcacgccgacaaacgccgcatatttgcctgaagcgttgtacatgccgcacgtcagcattaatgccttggccaattttgccacatcttttggaatcacctgctcgtgtcgaatcggatgatacccgtcatgagcaaggatcaggccgatcaacgcaatatcttctgtagtgctctccatagcgcattgcttcaagtacacctcaagtgtttcttctacttcagcttctaaaaagtttgtttcttttaaatagtaggccagcgctctgttgcggtgggcggtttcccattcagaacggaatacttcttcatgaattcttggccgttttcctatcaaagtttccatcaccgagtaaagaaactcgagcttttcgtatgcagattctccgggaaggatcgaagcgatggtgagggcacccgcgttgatcatgggattgaagggctttcccggcttgttgatttcgagccgaatgattgaattaaaggcgtcacctgtcggctcgacatctacgcggtcaagcacatagggaatgccgcggctcatgcaggcggcaataaagctaatcacttttgaaatgctttgcatggtaaaagagacgttccagtcgccggcgtgtatcatcgttccatcaggctccaatacacagatgccgagctgtgaatcattgacttttcctaaagcggggatatagtttgcgctttgtccattggcggcaaaagggcgatagtattcaacccaatcatgaagctgtaacgccgggtttatgtctttctggtgctcttttatcaattctttcatcgaattcctcctcactgatttttttcttaaaggactgaggtgtatcaaaacgaaggctaagggggcgttaaacgctttcataatagcggaaggtataattactgtataatggagactacagaatcatacaaaatacgacaaaaacattttgaaaataagcagtaagatttataaaaacctcatgttctgggtcaaaagcaatttgcaggttttctcccgattccccaaaataaaaagcgaggatgtgatcaacataaaactggaacggtttattgaaaaagacggatatatactggccctcatgctgattacggtgccgctggccggtgaactgaaattttatcccctcaatgaagaattccgggtcagctttggggcaccggtttttttcttctttttatcattgttgcggcatgtgcccgctgtgctgccgggttttctgactggagcggctgttttcatctttcgcgtctttctggaattatggggcggaggacacaatgggctgactccgattctgtatgatcaagcgtctggctttttcttttatatgacttacgcctgtctgttttccatattaaaggccaatcgtttccgtgaacggccgattatgctcggtttcattgggtttatgattgaagttgtgtcagattgtgtcgagctaactgtgcaatttctcatttttcatacggttgtcacgcctgagaaaatcactgacattgcggtgattgcgatttctcacacatttattgtgatgagcttttatagtgtgctgaagctgtatgaaacacaatcgagagaaaaacagacaaggcagcagcacgagcacatgctgatgatcgtttccaatttatatgaagaaacggtgcacctaaaaaagacattgaaaacgacagagaaagtgacaaacgattcgtatcagctctatcgggaaatgaagggcaaggatgttcagctgagcggcagaatcctgagactggccggagagattcatgaagtgaaaaaggacaaccagcggatattcgcagggctttcaaaactgatttcgaatgagagtttgagagattatatgagggcttctgatttgctgcagctcgtgattcgaatgaatgaaaagtacgctgaagcactagggaagcagattgatttttactgctcgatcgagggagagcatgacgaatatcacgtatttatcgtgctttcgatcattaataatctaacagcaaatgcggtagaggctatggatgaagagggaatggtcagcctgaggctccgtaagccaaatgagagtatggtagaattccaggtggaagacaatggccccgggatttccgagaaaatcggagacattgtgtttgacccgggctttacttcaaaatatgacgaatttggcacgccttctacgggtatcggactttcctacgtaaaggaaatcgtgacagagctagaaggggatatcacgtttgataatcagcagcggggagtggtgtttgccatcaggctgcctgtccggcatttgattcagaaagggtgaaccaaaagctatgcgtttttttattgcagatgatgaccgtgcggtgcggtcaattttaaggcagatcattgaggacgaagatctcggggaagctgctggtgaagcagacgacggaagccaagtggaagggcatatgctgcaatttaagcagattgatattttattaatcgatctgttaatgcccggaagagacggcattgagacgattcgtcagatccagaatacgtactccggcaaaatcgtaatgatctctcaagtggaggcgaaggaaatggtcggggaagcgtactcgctcggcatcgaatattttatccataagccgattaaccgcattgaaattgtcacggttctccaaaaggtgaaggagcggatcgagcttgaacactcgattggagccattcagcattctctaagccggcttgtcaatcggactgaacggaaagcgcgtccccagcagaagagtgacagcggtttaaaagaggcaggaacattcctgttgtccgagctgggcatgatgggagaaggcggcgcacatgatctcatggcggtcctgcagtatttagcagaacacgagcaatccgagccgcacgaaaaacaaagcccttcgctaaaacaaatattcacccaagtagcggtacggaagctggggacaggagcctcacagacggaagtcaatcgcgaaatgaaagcctcggagcagcgtatccgcagagcgattattcattcgctgcaccattttgcttcactgggcacaactgatttttcgaatccaaaatttgaaacctatgcatcgaaattctttgattttccggttgtcagccagaaaatgaaagaactccaatccaaggatgcaaaaccccttgcacctgctagaataaatatgaaaaaattcatccacgtgttttttttggaagcaaagcttttgcatgagacgatgaaacaaagaaggatataaaccaaacagccggctgaccaggctgtttttttgctgcgcagaatcccggccggacagtgatttaccgcttttttataaaatatcagaaaataaagatattgacttattgtttatttgtcttacaattaaacaaaaggatatatgggaaggagcggatgtgaaagaaaaattaataaaagcgcttacagatagaggccgtatacacaaataacaggaggttatgttgatgagccgtatcagaaaagcacccgctggaattttaggttttccggttgctccttttaacacacaaggaaaactggaggaagaagctctttttcaaaacattgagtttttgctgaatgagggcttggaagcgatatttatcgcttgcgggtctggtgaattccaatctctcagccagaaggaatatgagcaaatggtggaagtcgcagtctcggcagccggaggaaaggtgccggtctacacgggggtgggcggcaacctcagcacagcgcttgattgggcgcagctgtcggagaaaaaaggcgccgacggctacttgattctgcctccgtatttggtgcatggcgaacaggaggggctgtaccagtatgcgaaaacgattattgaaagcactgacttgaacgcgattctttatcagcgcgataacgcagttctctctgttgaacagatcaaacgtctgaccgaatgtgaacagcttgtcggtgtcaaagacggggtaggaaatatggatttgaatatcaatctcgtctatacgatcggcgaccgcttgggatggctcaacggaatgccgatggctgaagtgacgatgccggcttatctgccgatcgggttccactcttactcttcagcgatttcaaattatatcccgcatatttcgcgaatgttctatgatgcattgaaaaacggaaatgacgagcttgtgaaggaactctatcggcatgtgattctgccgatcaacgacattcgcaaacaacgaaaaggctacgccgtatccttgattaaagccggtatggaaatcatgggtttgaatgtaaggaatacagccagaccgcctgtcggcccggttgaaaaagatcattatcagcaattggaagcaattttgaagcaggcggctgaccgttttccgaaaaaagccgcgacggtttgaccagaaaaaacacgaaaggggcaatgggcatgtctgtgatcacggaacaaaacacgtacctcaactttattaacggagagtgggttaagtctcaatcaggcgatatggtcaaagtcgaaaaccctgccgatgtgaatgatattgtcggatatgtacagaattcaacggctgaagatgtggaacgtgccgtcaccgccgccaatgaagccaaaacggcttggagaaagctgacgggtgccgagcgcggccaatacttatacaaaacagcggatatcatggagcagcgcttggaggaaatcgccgcctgtgcaacgcgtgaaatgggtaaaacattgccggaagcgaagggagaaacagcccgggggattgccattctgcgctattacgccggagagggcatgcgaaaaacgggtgacgtcattccgtctactgacaaagacgcgctcatgtttaccacccgtgttccgctcggtgtggtcggtgtgatttctccgtggaacttcccagtggcgattccgatttggaaaatggcgccggcattggtatacggcaataccgttgtcatcaaaccggcgacagaaacagctgtgacatgcgcgaagatcattgcctgctttgaggaagcggggctcccggcaggggtcatcaatttggtgacaggcccgggttctgttgtcgggcaggggcttgctgagcatgacggtgtaaacgccgttacgtttaccggttcaaatcaagtcggaaaaatcatcgggcaagccgctttagcgaggggagccaaatatcagcttgagatgggcggcaaaaaccctgtcatcgtagctgatgacgctgaccttgaagctgcggcagaagctgtcataacgggggccttccgttcaaccggccagaaatgcaccgcgacaagccgtgtcatcgtacaaagcggaatttacgagcgctttaaagaaaaactgctccagcgcacaaaagatattacaatcggagacagcttaaaagaggatgtctggatgggaccgatagccagcaagaatcagcttgataactgcctgtcatacattgagaaaggcaaacaggagggcgcttcccttttaataggaggagaaaagctggagaacggaaagtatcaaaacggctattatgttcagcctgccatctttgacaatgtgacatctgagatgacaattgcccaggaggaaattttcggtccggtgatcgccttgatcaaggtggactcgatagaggaggcgctgaacatcgccaatgatgtgaagttcggtttaagtgcatccatcttcacggaaaacatcggccgaatgctttctttcattgatgaaatcgatgccgggctggttcggatcaatgcagaaagcgcaggtgttgagctgcaggcgccttttggcggcatgaagcagtcgagctcccactcccgagaacagggtgaggcagcgaaggactttttcacagcgatcaaaactgtttttgtgaagccgtaatggtgctggaaagaggcgtgcgtctctttcccggtttatcacaaccagcatatgattctctactttgaaaaggagaagatactatgaaaaaagactttgcgagtgttactccggcgggcaaaaaaacgtccgtgcgctggttcatcgtgtttatgctgtttcttgtgacctctattaactacgcggatcgagcgacgctttccatcaccggagattccgtccagcacgatttgggattggactcggtcgccatgggatatgtcttttctgcctttggctgggcctatgtcatcggacagcttccgggcggctggctgctggaccgttttggttcaaagactatcattgcgttaagcatctttttctggtcgttttttacgttgctgcaaggggcgattggctttttctccgccggcacagcgattatcctgctgtttgcactgcgttttctggttggtttatcagaagcgccttcatttcccggaaacggcagagttgttgcctcatggtttccaagctccgagcgcgggacagcttcagccttttttaattcagcacaatacttcgcaatcgtcattttttctcctttaatgggctggcttacccactctttcggctggcattccgttttcgttgtcatgggtattgcaggcattcttctggctgtcatctggctaaaaacggtgtatgaaccgaaaaaacatccgaaggttaatgaagctgagcttgcgtacatcgaacagggcggcgggctgatttccatggatgacagtaaaagcaaacaagaaacagaatcgaaatggccgtatatcaaacagctgttaacgaaccgcatgctgattggcgtgtacatcgcgcaatactgtattacgactctcacctatttctttctcacatggtttccggtatatttggttcaggcccgcggcatgtctattcttgaagctgggtttgtcgcttccctgccggcgctgtgcggatttgccggcggcgtgcttgggggcattgtgtcagacatcttactcaaaaaaggccgttcactgacctttgcaagaaaagtgccaatcattgccggcatgctgctgtcttgcagtatgattgtctgtaactacacagattcagcatggctcgtcgttgtcattatgtcgctcgcgtttttcggaaaaggcttcggcgcattgggttgggctgtcgtgtcggacacgtctccgaaagaatgtgcaggattaagcggcggtttgttcaacactttcgggaatattgcctcaattacaacaccgattattatcggatacattgtcaatgccactggatctttcaatggcgcgcttgtgtttgtcggcgctaacgcgattgcggcgatcctcagctatttgctgctggtcgggccgatcaaacgggtcgtgttaaagaaacaagaacaagaccccgatcaatcgttgcctgtctaatatttatgaaagcgctttataaagggaggaaaatgcatgagttcaccgatacaagagcaggttcaaaaagaaaaaagatcgaatattccctcaatttctgaaatgaaggtgattcctgttgcgggacatgacagcatgctgctgaatctaagcggagcacacagcccgttttttacccggaatatcgtaatcttaacagacagcagcggaaatcagggagtcggcgaggtgcctggcggagagcatattcgccgcacactggagctgtcagagccgcttgttgtcggaaaatctatcggtgcgtaccaggcgatattgcaaacggtcagaaagcagtttggcgatcaggacaggggagggcgaggaaaccagacgtttgatttgcgcaccactgtgcacgccgtcaccgcactggaagcggctttgttggatttgcttggaaagtttcttcaggaaccggtcgcggctttgctgggcgaagggaagcagcgtgatgaagtaaaaatgctcggttacctcttttacatcggcgaccgaaatcggacgaccttgccgtatcaaagcgatgagcagtcagattgtgcgtggttccgtctgcgccatgaggaagcgctgacgccggaggccattgtgcgtcttgccgaatccgcacaggagcgctatggctttcaggatttcaaattgaaaggcggggtgctgcggggagaagaggaaatcgaagctgttaccgcattatcgaaacgttttccagaggcaaggatcactcttgatccgaacggggcatggtcattagaggaagctattgcattatgcaaaggaaagcaagatgtgctcgcgtatgcggaagatccatgcggggatgagaatggctactccgctcgtgaagtaatggctgaattccgccgcgcgacagggcttccgactgcgacaaatatgattgcgactgactggcgggaaatgggtcacgcgattcagctccacgcggtcgatataccgctggctgatccgcatttttggacgatgcaagggtcggtgcgggttgcgcaaatgtgccatgattggggtttgacatggggctcgcactccaacaaccactttgatatttcccttgcgatgtttacccatgtggcagcagcggctccggggcggatcacggcgattgatacccattggatctggcaggacgggcagcgattaacgaaacagccttttgagatttcttctggctgtgtcaaggtgccggataagcctggactaggcgtcgatattgatatggaacaagtggaaaaagcgcatgagatctatcggaaaatgaatttaggcgcacggaatgatgcgatcccaatgcagttcctgatcagcaactgggaatttgaccggaagcgcccgtgtcttgtgcgataagtttgattgtaaatattgtcatatccgctattttgtcttacaattgaacaactgaagggagagttgttcgtgtacgaaggtttagaggatttgaaagtcgatacagtcaatcggaaaacattagccaagcaggtcatcgaacggattgtccatttattatcgagcggacagttgagggccggagacaaattgccgacagaaatggaactgatggacattttgcatgtcagcaggccggtgctacgggaagcactcagttcacttgaaacgctgggcgtcattacgagaaaaacacgagggggcacatatttcaacgataaaatcggcatgcagccattttccgtcatgcttgctttggccactgataatcttccggctatcattgaagcgcggatggcgctagaactcgggctcgtgacaattgccgcggaaaaaatcaatgaggaagagcttcagcgtttgcagaagacgatcgacgatattgccaacagcactgacaatcattatggtgaagcggataaagagttccatcgaattattgcgttaagcgccaataaccccgtcgttgaagggatgattcagtccctgctgatcacccatgcgaaaattgacagccaaattccgtacagggagagagatgtaacggtcgaatatcacaaaaaaatctacgacgcccttgccaaaagagatccgtacaaagcacattaccacatgtatgagcatctgaaatttgtccgtgacaaaattctaaaaggaatggatgaaaaataatggtgagcaaccgcagttgaaacgtaagagctgcggtttttttaaaccaatttagaaaacgcttactaaaatatgaggagtgattttcatatggcgatgaacctcaggaagaaccaagcccccctttacatcaaagtgcatgaaatagataacaccgcgattattgtaaatgatggagggctgccaaagggcactgttttctcatgcgggctcgtacttgaagaggatgttcctcaaggccataaggtggccctcaccgatctcaatcaaggggacgagatcgtgcgttacggagaggtgatcggatttgctgatgagacgatcaaacgcgggagctggatacgggaagccctcgtgagaatgcccgctcctccggcgttagacgatcttcctctcgcaaacagggtgccgcagccgcggcccccacttgaaggatatacatttgaaggataccgaaatgcggatggcagtgcggggacaaaaaatatcctcggcatcacgacaagtgttcaatgtgttgttggcgttttggattatgcagtcaaacgaataaaagaagagctgctgccgaaatacccaaatgtcgatgacgttgtgccgctgcatcatcaatacggatgcggcgtggcgatcaatgcgcccgacgctgtcattccgatccgcacgattcaaaatcttgcgaagcatccgaacttcggcggtgaagtaatggtaatcggattgggatgtgaaaagctcctcccggaaagaattgcctccgaaaatgatgatgacattctatcgctccaggatcaccgaggttttgcggcgatgatccaatccattttggaaatggcggaggaacggttaatcaggctgaacagcagaacccgggtgtcatgccctgtttcggatctggttatcggcctgcaatgcggcggcagtgatgcgttttccggcgtgacggcgaaccctgccgtggggtatgcggctgatttattggttcgcgcaggtgcaacggttttgttttctgaagtgacagaggtgcgggatgccattcatttattaacgccgcgggctgtcagtgaagaggtcggacaatcgctgatcaaagagatgaagtggtatgacagctatcttcggcggggagacgcagaccgtagcgcaaacccgtcaccaggcaataaaaaaggcggattatccaatgtggtggaaaaagcgttaggttcggtagcgaaatcaggcacaagccccatctccggcgtgctcggccctggtgaaagagcaaagcaaaaaggcctgctgttcgcggcgacaccggcaagcgattttgtgtgcggcaccctgcagctggctgcgggcatgaatttgcaggtgtttacgacagggagaggaacaccatatggcctggctgctgcgccggttctgaaagtatcgacgcggcattccttatcagagcattgggctgatttaatcgatatcaatgccggccgaatcgcgacaggagaggccagtatcgaagacgtaggctgggaaatcttcaggacgattttggatgtggcaagcggccgcaaacaaacgtgggcagaccgttggggtcttcataatgatttgtgcttgtttaatcctgctccagtgacttgattcatgtttttatagcggaaagatggaatatgctgtaaaatgaaaatcagcgtataggaaacggaggggttacagcatggcattcattagattccgagtgacacgaattcaatagtgaacaactctcgcctgaatgcgagagaatcgggatgaatccgcctatgtatgagcccttatatggttatcaaaaaagagggtggcgtgcctgcccttttttgtgccttcaagcatcccttctctctactgcaggccggagcatgagaaaggggaaatgggatgacaaaccttaacgaaaaacagcttatcactgagattgtcgggcttgcacgcagccaaggtttgacggttcattctgagaacgcgcaattgaatgaaaccggaatggactttcaagttgtatttgccaaggacgacacaggtatgccatgggtgctgcgaaaaccgcggcgaagtgatgttgtggaaagagcatctgcagaaggcataacgcttgcctttctccgcgcgaatctgactgctgatgtgccggattggagaattcatacaccggaattgatcgcttaccccatgttaaaaggaacgccggctgctggaattgacttggaacaaaagcaatatgtatggaatatggatcatcagccgccgtcagacgactttgtccgcacacttgccgacatactggctgaattacatggcacggatcaaatatctgctgggcaatccggaatagaagtgataaggccagaagatttcaggcaaatgacagcagactctatggttgatgtgaagaataagcttggcgtatctacgacgctttgggaaagatggcaaaagtgggtagatgatgatgcatactggccgggtttctcttctttgatacacggcgatctccacccgccgcatatccttatcgatcaaaatggacgtgtcacaggacttctggattggacagaagcgaaggttgctgacccagccaaggattttgttctttatcaaaccattttcggagaaaaagaaactgcccgtttgcttgaatactatgatcaagcaggcggccgaatatgggcaaaaatgcaggaacacatctcagagatgcaggcggcgtatccggtggaaatcgccaagctagctctgcaaacacagcaggaggaacacatcaatatggcgctggaagcacttggtgtaacatcggattaagaattgacttcgtttcatgaaccgagtattataaactctacaaataatagaacggattaacaatcgtgaggaagagcaagtacgcatcagaatggaggttcagagagtcggtggcaggtgtgaaccgatcctcccctgatgccgaatgggcttctgaattgctttgctgaacggatagtaggcgatgccgggtttctctccccgttaccaagagaggagtatcgaaacataggttttctgtacttagagtgaacggctgtatagctgttaataaaggtggtaccgcgagaccctcgtcctttgcataggacgggggttttttgtgtttcttaaaggaggtgacggccaatgtacgatggctggtggtggcatagcagatgagttagaaaggaggatatcaaatggtcattgcaactgatgatcttgaggtcgcatgtcctaaatgtgaaagagcgggagaaatcgaaggaacaccttgcccggcctgcagcggaaaaggtgttattctgactgctcaaggatatacgcttctcgattttatccaaaagcatttgaataagtaaaggagaaaagctgagctgagatgagagcagaagagcagagtaagattcgtgaggccgcagcaggtacgatttttttgctgatcggaacagtttgttttgcgtctaaatcgatttggataaaatgggcataccaaatgggtgctgagccagatgccgtgctgctatacaggcagctgctggctgttccgctgttttggctgatttttttaatataccgtcctccaatgccagacggtaagaaaaaaggagacctatggaaggcttgtggcgcgggagtgttttgtttttttctgtctcccttgcttgattttatcgggctgaaccatgtatccgcaatggttgaacgtatattgctgatgagctatccgttgtttgtgtttggattcaccgcgtgtcgtgaccggaaaatgtcctcaattcaggaccttttcgcagttctggcggtcatgtttgggcttttcttggcgctgggcggctggaatgctgagcttttccaggcgaatatgattggagctgtattcattttgttatcttcggccgtctatgctggttatcttgtcctttccgggcatctcgtccatcaaatcggagggatccgtctcaatgcatacgggatgacagctgctggagctgccatgatgctttacacagggataaaatcggcggctggcatgaatacgccaatggcagcatatccgctttctatgtatggtttgttcgcagtaattgcagtcgttaccacagtgattccatttgtgctaatgcttgagggcataaaacgaatcggggcacagcgagccgccgccatttcaatggcagggcctatcctgacgattttctatggagctttatttctcggtgaacggctcgggctcattcaagtcattggatgcggtggcgtattttttgtcattacgggcatggaatacaggaagctgaaaacaggaaaaaaagaataatttttataaaacacacacgtttttcaattacaataagtgtaattacgtgtgtgttttttgattttgtaaaggttaggtgaggagatgcagcgcatattgcttgtagaagacgaccactcaatcagtgaaatggtggatcattatttaacaaaagaaggctttggaattgtgcatgctttcgacggagaagagggcatccggctgtttcagcagggttcatacgatttggtcctccttgatatcatgctcccgaagctgaacggcatggattttctgaaaatcatccgggaaaaaagcaatataccggtcttaatgatttcggcaaaagatggagatgtggacaaggcattgggactgggctttggggcggatgattatatcgccaaaccgttttcgatgattgagctgacagcccgagtaaaagccgcgatacggcgggcgacgcaatattcggcagaggagccggctgtgaataaggtgatccggattcaccagcttgcgatagatatagacaatgtttccgttttgaaaaacggagagccgctccagctgacgtcaacagaatggcagctgctgtgcttatttgcatcaaatcctaaaaaagtgtttacgaaagaacaaatctaccgttccgtttggaatgaagagtactttgatgatcagaacatcattaacgtacatatgcggcggctcagagaaaagattgaggatgacccctcctcccctcaatatattaaaacgttatggggcatcggttataaattaggagagttttagaatgacagtgctatgggtggccgctgtcatcgctctggcgtgtctgaatgtgattcaattcataatgaaaaagaagcgggacgggaatctggcttacacggctgaccagcttagctacatgctcagccgggattcggcaggacaaattttgcttcctacagacgatcatgcgctcaaagacttgcttgttaacatcaatcttatcgttgagaatcgtcagcagatcagcgcccaatttgccaaaacagagcaatccatgaagcggatgctgaccaatatgtcgcacgacctgaaaacgccgttaacggtcattctcggttatattgaagccattcaaagtgacccgaacatgccggacgaagagcgggaaagattgctggggaagctccgccagaaaacaaatgaacttattcagatgatcaattccttttttgatttagcgaaattagaatctgaagataaagagatcccgatcaccaaagtacatatgaacgacatatgcaaacgaaatatcctgcactattatgacgctgttcagtcaaaaggctttcaagcagccatcgatatccccgatacgccggtgtatgcgcaggcgaatgaagaggctctggacagaatcctgcaaaacctattgtccaatgcgattcaatatggcgcggccggcaagttaatcgggctgacgctgtcttatgatgagaggaacatcgccatcaccgtatgggatcgcggaaaagggattagtgaaaccgatcagcagcgggtgtttgagaggctgtacacactggaagaatccagaaataaagcatttcaaggaagcggcttgggtttaaccatcacaaaacggcttacagaaaaaatgggaggcatcatatccgtccaaagcaagccgtacgaacggactgcatttacgatcacattgaaacgcatgacatattaatcgtaagaatttcttaaggtttgagaaataaaaatgacagggctcgccgctacaatagaaaacaggaaaagagagggaaggagaaacaaagttgacttatatcgtacaaacaaacgggctgaccaaaacatatcagggcaaagaggtcgtatccaatgtcagcatgcatattaaaaaaggtgaaatctatggctttctcggcccgaacggcgcggggaaaacaaccattatgaaaatgctgacgagccttgtcaaaccgacaagcggtgaaatcatcatccttgggaacaagttcacccacacgtcatatgaggtgctggggaacatcggcagcatgattgaatatccgattttttatgaaaacctgacagctgaagaaaatttagatctgcattgtgaatatatgggataccacaataaaaaagccatacaagaagtgctggatatggtgaatttaaaacaaatcgacaaaaaacccgtcaaaaccttttccctcgggatgaagcagcgccttggaattgcgcgtgccatcctcacgaagccggacctgcttattctggatgagccggtgaatggtcttgaccctctcggcattaaaaagatcaggcaattgtttcaagtgctgagcaaagagtacgggatgacgctgctgatctcaagccacctgctgggtgaaatcgaacaaatcgcggacacaatcggcgtcattcgggacggcaggctgcttgaagaggtatcaatggaggatgtcaggggccagaacactgaatacatcgagcttgtcacgccgaatcagacaagggcctgctttgtgctggagaaagagctgcaattaaccaactttaaaatattaaatgagaaaacgattcgaatttacgaggctgaagcctctcaggctgccatatccaaagcattgattttaaatgatgtagacattgaatcaatgaacaaaaagtatacgtcgctggaggattattttatcaaattgatcaacggcaatagcatcagtgcgtaaaggaggagagacacgttgatgaatttgatcagaatcgaattaagaaaaatgaaaatgggctggtatatcagaggtgccctcattgccaacgtgatcattatgggttttatgtggctgatcagttattccgaaaaagccgatggcggggtttcgttccaaagtacggatgaagcattcctcatcatcggcaccttcgtcagagcggtatttatcgtatttggcgctgtgctgatcgtaaaattggtgatttcggaatataaaaacaaaaccattcttgtgatgttcacgtacccgatcagccgtaaaaagctgctcaccgctaagctcatgatcgcgggcggactgacgtttatcacgattttactttcaaatatactcatagccgccggtttcttttggctgaactcgatctgccatttcataccgggagagcttacttccgagatcatttctcaacaggcggtcaaaatggcggttttcgcttttggcgccgctggaaccagtttagttcccatcttttttgggatgcgtagacactcggttccggcgaccatcatttcatctgtagtaattgtgatgctcatcagctcaacaagtccgggcttctcgatttcatctgttgtgtatatcccgttatcgttagcggcattcggtttgttcttttcctacatggcgatcaggaatgcggacaagcaggatgcgtaaacaaaggcgcccaatatgtataaaaggccgatgctgtcagcaccggcctttccattatgagtctgttcttgtttcaagataatgcttcttgccaatctctttgctcatcatatagaaatggaagcaatattcaccgattgccatgacgatcgcgccgaataaagccgccaatgcaacttcaccgccagtcatccccatagaaagcggcatgcccatcagccagatcacgagaaaggccaaaccaaaatcagccaaagttgcaatcatattattccatttcggcaatacataaagatcgcccagcaaataagaaataacccctaacacaatcgtcattagcagcgtatcaccaaacgtgaaaccaaagcccagaccaagcaccagatacaacacaataatcgtcataatacctttaatagcgagcgctttcacatgtgtcattacaattcctccttttgtcatttgatttgttatgtataattcctcaaatgtaaaaagttaaaccttatttcttttcggaggcgggtgcaaatctgctggggagaggtcaatgatgtgaatccaggaattgaggctgcggcgcttcgacagcggaaacgtgaagcttgtactgcaccggacgctgctttgatgcccaacagcccattatgtttgctgtttttagatgaataaatttaaaaacttctcctgtccctccgtcatcacttctgaagtaatgaaatatgatgaaaagagatcaaggggaggtgacgtgatggcggtcgtgagagcaacgagtgcggatgtcgatttgatggcaaggctgctcagagcggaagcggaaggcgaaggcaagcaggggatgctgcttgtcggcaacgttggaattaatcggctgcgggcgaattgctcagattttaaaggcctccgcaccatcaggcagatgatttatcagccacacgcgtttgaggctgtgactcatggatatttttatcaaagggcgcgagatagcgagcgtgcccttgcacgccggtcgattaatggtgaaaggcgctggcctgcaaaatttagtttatggtacttcaggccgcagggggactgtccagcccagtggtataaccagccgtttgtggccagatttaagtcacactgcttttatcagccgacggcggagacgtgtgaaaatgtatataacacattttagagacaggacaccgttcaaattgaacggtgtttttctttgaaaagatgcaatgcaaaatattcctgtgagataatcaaagaaaaaagagctgacggagatgacagaatggcaacaattgacctgcaaaagaaaagtgtaaagatcgtactggagaaaaagcagttaacgaaggtgacggctcgtgttggactggttcttgatattacgggatcgatgagaccgctctacaaaaacgggacggttcaaaatgtggtggagcggattttggcagtggctgatcagtttgatgataacggtttgctggatgtatgggtgtatgataatgaattttcccgattaaagccagtttcagaaaaggatttttcgggctatgtcgatcgtgaaattttaaataatgaccgcttgcataaattcggcagaaatgatgagccgccagtcatgaaggacgtgctgcgcaaatatgttacggaggaaccgagctcgtatcctgctttcattgtttttatcaatgacgggggctgtaaaaagtcaatcaaaccgataattgaagcttcttctgataaaccggtgttctggcagtttgtcggcatcggaaacggaaactttgattttctcaataaactggatacgttagaagggcgtgtcattgataacacgaacttcctgcatatcgaagagattgaccgcatttctgatgatgagctttatgatgctctgcttgctgaatttccattttggctgaaagaagcgaaggaaaaagggattgtaagagaacaagagcctcctgctgaaaagccgaaaaagaagggctttttcagcagattgttttcgaaataactgataaagagcactgagtcattctgcgaaatggctcggtgtttttgtttttttaagatcatgtgaagaaaaataggccgaatgggcggcttgcaaacgacaggatatgcagaaaacgcgtcattcagccagctttcggcatgtttcagcagcaggcttgtgagggaagacctgtttttaatgttcagcgcttacaatcagttcacacttcttcacagtcgtttaacaatgatttcctataatggagacgatcaatgaggagagaggggatcttgaatggcatacgacagtcgttttgatgaatgggtacagaaactgaaagaggaaagctttcaaaacaatacgtttgaccgccgcaaatttattcaaggagcggggaagattgcaggactttctcttggattaacgattgcccagtcggttggggcctttgaagtaaatgctgcgcctaaattctcaagctatccgtttacattaggggtagcgtcaggtgatccgctttctgacagtgtcgtgctttggacacgtctggcaccagatccgctgaatggcgggggaatgccgaagcaagcagtgcctgtcaaatgggaggtcgcaaaggatgagcatttccgcaaaatcgtaagaaaaggcactgaaatggctaaaccaagtcttgcccattccgttcatgtggaagcggacgggcttgagccaaacaaagtgtactattaccgtttcaaaaccggccatgaactaagccctgtcggaaaaacaaaaacactgcctgcccctggcgccaatgtgccgcaaatgacctttgcatttgcttcctgccagcaatatgagcacggatattatacggcctacaagcatatggcaaaggaaaagcttgatcttgtcttccatctcggtgattacatatatgaatacggcccaaatgaatatgtatcaaaaacaggcaatgtccgcacgcacaacagcgcggaaatcattacgctgcaagactatcggaaccgtcacgctcaataccgttctgacgccaatcttaaagctgcacatgcggcattcccttgggttgtaacttgggatgaccatgaagttgaaaacaactatgccaataaaatacctgaaaaaggacagtcggttgaagcattcgtgctccgccgcgcggcagcataccaggcatactatgaacatatgccgctccgcatttcctctttgccgaatggcccagatatgcagctgtaccggcactttacgtacggaaacctggcgtccttcaatgtgcttgatacccgccagtacagggacgaccaagccaataacgacggcaataagccgccttctgatgaatcgcgcaatccgaatcggactctgcttggaaaagaacaggagcagtggctcttcaacaatttgggcagctcgacagcccactggaatgtgctggcgcagcagattttctttgccaagtggaatttcgggacaagcgcaagcccgatctacagcatggattcgtgggacggctacccggctcagcgcgaacgggttatcaatttcattaaaagcaaaaatctgaataatgttgtcgtactgacaggtgatgtacacgcaagctgggcatcgaatttgcatgtcgatttcgagaagacaagttcaaaaatattcggagccgaatttgttggaacctcgatcacttccggagggaacggagcggataagcgagcggatacggaccaaattttaaaagaaaatccgcacatccagttctttaacgactatcgcggatatgtccgctgtacagtgacgcctcaccagtggaaagccgattatcgggtgatgccatttgtgaccgagccgggcgcagccatttccacgcgggcttcattcgtttaccagaaagaccaaaccgggttgagaaaggtatcatccacaacaatccaaggcggggtgaagcaatccgatgaggtcgaagaggatcgtttcttttcgcacaacaaagcccacgaaaaacaaatgattaagaagcgtgcaaaaatcacgaattaaggagtggaaattatgttttcaaacattggaataccgggcttgattctcatcttcgtcatcgccctcattatttttggcccttccaagctgccggaaatcgggcgtgccgccggacggacactgctggaatttaaaagcgccacaaaatcacttgtgtctggtgatgaaaaagaagagaaatcagctgagctgacagcggtaaagcaggacaaaaacgcgggctgaatgctgatgaggcagacaccgggtctgcctctttttttatgaaagggagggcttttttgaatggataaaaaagaaacccatctgatcgggcatttagaagagcttcgccgccggattatcgtcacccttgcggcattttttctatttctcatcacggcttttttgttcgtacaggacatttatgactggctgatcagggatttggatggaaagctggctgtgctaggaccgagtgaaatcctctgggtgtatatgatgctttccggcatttgtgccattgcggcttctatccctgttgccgcgtaccagctgtggcgtttcgttgcaccggcgctgactaaaacggagcgcaaggtgacgctcatgtacataccaggtttatttgcgttgtttttggcgggcatctccttcggatactttgtcttgtttccgatcgtgctcagctttttgactcatttatcctccggccactttgaaacgatgtttacggctgaccgctactttaggtttatggtgaatttgagcctgccgttcggcttcttgtttgagatgcccttggtggtgatgtttttaacaaggctgggcatcttaaatccttacagactggccaaagcgagaaagctttcctattttctgctgattgtcgtgtccatattgattacaccgcctgattttatttctgattttctcgtgatgatcccgcttcttgtcctgtttgaagtgagtgtcaccctatcggcgtttgtctacaaaaagaggatgagggaagaaacagcggcggccgcttagtgcagcgtaccacccggtgacttcacatcctcatcatattgtgcggccgtaacagcggcgattctcaatgcccggacaatcgtgtccaggctgaggctcggcgctgttttgtcgattgtttgctgcggaatgtaaggaatatgaataaaaccgccgcgaatgtgtggggatgtccggctaatgtgatccattaacccgtagaacaaatagttgcatacaaaggtccccgctgtgtaggaaaccgcagctggaatgccgtgttccttcatcttagcagtcattcgtttcacgggaagccttgtccagtaagcggcgggcccatctggagaaatctcttcatcaatcggctgatgtccttcgttatcggggattcgcgcatctgcaaggttgattgccactcgttccggtgtaatctgcatccgtcctcctgcttggccgacacaaattacgatatctggctgatgtttttgaatggcttggcgcagagtgtccagagcggatctaaagacggttggaatttgttccgctgtaataatggcttcttctgtctcgaagccattaagccgtttcgccgcttcccatgatggattgacggtttctttgtcaaaagggtcaaagcctgtgatcagcactttttttctcattctcccatctcctttttcttttattctattgtttatttatgggtttttcatcaaaataatgtaaaggagtgaatcataatggagcatttgccggagcagtatcgccagttattcccaaccttgcagacgcatacgatgcttgccagctgttctcagagcgcattggcagagcctgtatcaagggcgatccaggattattatgatagcctgctgtataaagggacgaactggaaagaagcgattgaaaaaacagagtttgcgagaaacgagtttgcaaagctgatcggggctgaaccggatgaagtggcgattgtgccgtcagtttctgatgcactggtttctgtagcatcgtccttaactgcatttggaaagaagcacgttgtatatacagatatggattttccggcggtgcctcatgtttggcaggcacactccgattataccgtatccgtcattccatcaatagacggcgtgctgccgcttgaacaatatgaaacgcatatttcggatgaaacagtactgacgtgtgttcctcacgttcattatcgtgacggctatgttcaggatataaaagcgattgccgagatttctcagagaaagggctctttattgtttgtagatgcttatcaatcagccgggcatattcccattgatgtgaaggaatggggcgtagatatgctggcagcaggcacccggaagtatttgctcggcataccgggtgtggcgtttctttatgtgagaaaggagctggctgacgcactgaagccgaaagcatcagcttggttcggaagagagagcggatttgatggggcttatgcaaaagtcgcgcgccgttttcaaacgggcaccccagcttttatcagcgtatacgcagctgcagcggctttatcgctgctgaatcatattggggtttctcatatcagggatcatgtgaaaacgatctgtgccgatgcagttcaatatgccgctgaaaaaggcctgcagctggcggcggcacaaggtgggattcagccgggcatggttgcgatccgggatgagcgggcatcggaaacggcggggttgctgaagaagaaaaaagtgatttgcgcgccgcgggaaaatgttatccgtctcgctccccatttttataatacgaaggaggaaatgcggcacgcgattgatgaaatcgcggcgaaaacgatccacaagtaaacatgaaaaagcccctgaacactagtcaggggcttttcatattaatgatctactttaacgcgtttcataaagaaagcgccaattaaaccgataatggcaacaatcattgcaaacacaaatgcgtgctgtacgcctgctgtcaaagcttgcgggatgactgccggatcggcagggtttttaactgtactcatataatcatgctggcctgcagccataatgctgaccgcaaccgctgttccgatagcgccggccatttgctgcagcgtgttcataatggcggtgccgtctggataaaattcacgcggcagttggtttaaaccgtttgtctgtgcaggcatcatgatcatagaaatcccgatcatcaagcaggtgtgcaggatgataatcagcacagctgttgaagtggtcgtgacatttgagaagaaccatagtacaacggtgacaatcacaaatcccggaatgacaagccatttcggcccgtatttatcgaacaagcggcctgtaacaggggacataaatccatttaaaataccgcccggcaagagaacaagaccagatgcaaatgcagtgaggactaagccgccttgcagatacatcggcagaagcagcatagatgacagaatgaccatcatacaaatgaacaccatgatcacacccaaaataaacatcgggtatttgaacgcacggaggttcatcataggctgcttcattgtcagctggcggattgaaaataagataaggccgacaacgccgacaatcagcgacacgataacagtcgggctggaccatcccccggagccttcacccgcgttgctgaatccgaatacaatgccgccgaagccaatcgtcgacaggatgatagacaatacatcgattttcggctttgtcgtttcagatacattttgcatatatgcgataccgaaaacaagcgccagcacaaggaatggaagagagatccagaaaatccagtgccagttgagatgctccagaaccaatcctgagaaagttgggccgatggcgggcgcgaacataatgacaagcccgatcgttcccattgcggcaccccgtttatgaggcgggaaaatcaccaagattgtgttaaacatcagcggcagtaaaagaccggttccaagtgcctgaacgatccttgccgctaataaaaacgagaagctcggcgcaagcgccgcaatgaatgtacctaaaattgaaaagataagtgacacggtaaaaagctgtcttgttgtgaaccactgcaacagcagtcctgaaacaggaacaaggataccgagtacaagcaggtagcccgtcgttaaccattggacggttgccgctgtaatgttcaattccttcataaggtcggttaacgcaatattcagcgctgtttcactgaacatgccgataaaaccggccaacagcaaggaaatcataatcggcatcactttgtattgctgagatgctttagctgttgtttccaaaatcatttcccctctctatcaactgcatgtagtatgtcgttttttttatctcttcagcaggtcaggaatgcagctggagatatgaaggagcggcgtactgttttttgccgtcaaagataaaaggatgccgccttcaatcatcgcgttaaccacagtgctggcttcttttgcacggctctcgctgcagccagtctgccgcagtttttcctcatacacagaggcccattctttgtaggcttcatgacaggcttcgcgcaacggttcgcttttcaatgacgtctcagccgctagcaagcccacaggcaagccttcaatgtcttccgtacatgaaaactggcaggagagctccttcaaaaaggcttgaatgccttccgctggatcggtgcaggcttccatgcagtccgcgattttctgacggatatactccttcatctcattcacggcttcgatcgcaagctgttctttacccccgggaaagtggtagtaaagagagcctttaggcgcgccgctttcctttataatctggttcagccccgtgccgtaatacccttgcagctgaaaaagccgggtagctgccgaaaggattttctcacgggaatctccataactcataacattcccaccttactgaattgcaatcaaaaatatagtgactggtctattatcttgattcaatcatcaattgtcaagaaaaattcattgtatgaaaagacaaaaaaagaaggatatgacaacaaaaaatactgagagaaaagctgactgatcttttgactgaatagataaaatgtacaatgattaatcatcatatggatgtaaggagagaaatagatgaaaaaacaacgaatgctcgtactttttaccgcactattgtttgtttttaccggatgttcacattctcctgaaacaaaagaatccccgaaagaaaaagctcagacacaaaaagtctcttcggcttctgcctctgaaaaaaaggatctgccaaacattagaattttagcgacaggaggcacgatagctggtgccgatcaatcgaaaacctcaacaactgaatataaagcaggtgttgtcggcgttgaatcactgatcgaggcagttccagaaatgaaggacattgcaaacgtcagcggcgagcagattgttaacgtcggcagcacaaatattgataataaaatattgctgaagctggcgaaacgcatcaaccacttgctcgcttcagatgatgtagacggaatcgtcgtgactcatggaacagatacattggaggaaaccgcttattttttgaatcttaccgtgaaaagtgataaaccggttgttattgtcggttcgatgagaccttccacagccatcagcgctgatgggccttctaacctgtacaatgcagtgaaagtggcaggtgcccctgaggcaaaagggaaagggacgcttgttgttcttaacgaccggattgcctcagcccgatatgtcaccaaaacaaacacaactacaacagatacatttaaatcagaagaaatgggcttcgtcggaacaattgcagatgatatctattttaataatgagattacccgtaagcatacgaaggacacggatttctcggtttctaatcttgatgagctgccgcaggttgacattatctatggataccaaaatgacggaagctacctgtttgacgctgctgtaaaagccggagcaaaggggattgtatttgccggttctgggaacgggtctttatctgatgcagccgaaaaaggggcggacagcgcagtcaaaaaaggcgttacagtggtgcgctctacccgcacgggaaatggtgtcgtcacaccaaaccaagactatgcggaaaaggacttgctggcatcgaactctttaaacccccaaaaagcacggatgttgctgatgcttgcgcttaccaaaacaaatgatcctcaaaaaatccaagcttatttcaatgagtattgaagaaaagaaggcgaataagccttcttttttttggctttttaggaccaataatgacctctgaatcttaaaatttctttaaaaataagccaaaattaccctttacttaattaatttggtaacgtaatataattggagaatttgttacaaaaaaaggaggatattatgaaatttgtaaaaagaaggatcattgcacttgtaacaattttgatgctgtctgttacatcgctgtttgcgttgcagccgtcagcaaaagccgctgaacacaatccagtcgttatggttcacggtattggaggggcatcattcaattttgcgggaattaagagctatctcgtatctcagggctggtcgcgggacaagctgtatgcagttgatttttgggacaagacaggcacaaattataacaatggaccggtattatcacgatttgtgcaaaaggttttagatgaaacgggtgcgaaaaaagtggatattgtcgctcacagcatggggggcgcgaacacactttactacataaaaaatctggacggcggaaataaagttgcaaacgtcgtgacgcttggcggcgcgaaccgtttgacgacaggcaaggcgcttccgggaacagatccaaatcaaaagattttatacacatccatttacagcagtgccgatatgattgtcatgaattacttatcaagattagatggtgctagaaacgttcaaatccatggcgttggacacatcggccttctgtacagcagccaagtcaacagcctgattaaagaagggctgaacggcgggggccagaatacgaattaatgaaaaacaaaaccttgaagaatgctattcttcaaggttattctgctttcagcacaatggttttcgcagccatatcatgaacggtttgttttttcttcgtaaatgcggcagtcaaatagatcaggcgggagaacacatgcacccacgctatcaggtaacggacaatggcttgcgggaaggatatttttttatatgtttcgtccctcacgatttgcagcccgatgatttttttgcccagtgtgcccttccaatttgtcagcggcatcagcaaagggtacacaatcagcatcaatatggcgacaataatgacaccggcggacccatcgccaaacgtaaatccggctgccaaaatcactgctgcggcaatgattacatcaagtaaaagagcgcaggcgcgcagcatgaaaccagctagttccaatagaaacactccttaaaatgttaaataaacacctaatgattgtaaaaaagaagggcctaaagtgggaataggtgataagccttaaatcacaaaagttggtgaaaatgtcataggtaaattggcataatcagccagcttatcacattaccaaattcttttttagcccgaaaccaagccctcagaagttatttttgttaaaatagaaaagttacaacagaattcggagggtttattgtgggaaaagtgaaacgaaatgccccttgcccatgcggcagcggcaagaaatataaaaaatgctgcggaagtaaagttgtcgacttcccggcggaactagcggcaaaagaagcgaaacaaattcaggaagacttagtggagtatgccttcacagtacatagagaaagcatttcaggctttatcaaccagcatgattttctttctgctatggacagacagacgaaagacatcagcgtatttaacttaggaatctggggaatcttcttccacccgcttgctggtgagaagacaatcttcgaagagtaccttcagaaaaaaggcgattcgatcactcgtccgaaaacgcgtgagatcgtagaatcatggcagagcatgacgcctgctttattgctgctgaaggacctgaaggaaggcatcattcactttgaagatgtcattacggcaaaacaattcgaagtggaaatggacgccagcaatcaagaccttcctccagtgggaagcctgattcttggatacccaatccacgaagcggaaaaagcagaattcttcatgcagttcacgatcttcccggtgaagagaacagaagcgctgatcagcaaggtgaagaaatatgcggatgccgctgtgaaggacggcaaaacgccggaggacttcatgaagcaggaattcaacaacgttctgttcgcgttgttagctgagaaagatgaagagccacaagcagagaaagcggaagtaagcactgttgagtgggcaaacgacttggagaaagaaaccgctgcggctattgaagaaggcatgagcggggaagagtatccgactgaattgatcccagctgttattgacatctggaaaacattctgcgagaaaaaatcacctgtcatcagaaagccggaagcttttgcggcggcagttgaatattatgtaaacgcaatttctcttaacggcgcgtccgtttcccaggctaaactggcgaaaaaatacggcgttagcgcatcaacgatttccagccgttacaaagaaattgaaagcacgctgcaagatgaagcagatcgttttgcacaagcgttatcctcataatggaaaaaaccttgaaaagccaggcttttcaaggtttttttatttctgaaacggaattttgatttctaaccggaagatggggtggcggtaggtaaaatccagcctgccaaaagcgcccttcaccagtttttgaatgatatatgtgcccatgccttcatgagcgccgtttttcgttgagcggccaaacgattgataaattgtatcgagcacttttgggtccatcccgggagtgctgttttcacaagtcagtacataaagcccgctgcgcagtgaagtctccagtttaatctctgctttttctcgggcctccgccgcgctgtcgagcgcattttctaatatgttgccgaccaagctgacctgatcagcaggcgaaaacggaagggaagaaagcggtgtatgcatatgcagcgaaacactcacattcgaggcgcgggctttttctaaaaaatcataaagcacccctgcaacgtacgcgttctctcctttcaaaaaacggtcatattggctgtattgatccgcccagttttgaatatatgcttgtgtatctgccttgggctgagctgatttgattgcagtgatatgtttcattgtgtcatgattccggcttctgacatcaatcagcatttgattggcgtgctgttcagcttgagtcagcttatcaatttgatcagaaagccttgcctgcaaagcagactgtccgatacggagcccttcacaccctgcaaatatcgcgattacacataataccggcatgatgtctgtgccaatcaacaccactcccaccgacatcacttgaatcaccgcaatccacgcacaaagccctgaggaacagtgtttccacacccgcttcgtattccaaatgtacaatcctgcagcagctgcgcctaaagcagcggcgagccaagaggcggctgtgctgtgtgaaaaagcagcagctccctgataacatatgaaactaaataaaatcagataaagacattgaaaaagggtaatcacgtactaaactcctcaaaaatagtagttttgaaaataatcaagctgctgcttagtgatcatcgcttttttagacgttccctcaaaggaaactgtgaatgaatgcttggtataagcggaaaaatgctttatgtaatgaatgttgataataaaggaacgatgcgaacgaagaaaatctttttcgggcaggtcgcctttaatatcatttaatgtttgatacgtttgcacctcttcggcggttgtcacaatcgtcgtcgaacgtcccgtccgttctgcgaaaataatatccttcttttgcaggacgtgcatttcagacttttgctttatcaatatacgcccattcaaactcgtttccgttttctttttcaagtaccggtcgaaggaagcggccagacggtcggcatagtacggcttcataatataatcatggacgttcaggtcaaaggcgtgaaccgcataaccgccgtggccggtaacaaaaatcacatccacatcaagtgaatgggatttgatcaaatcagcaagctcgtagccagacatatggggcatctcgatatcggcaagcagcagatcaatgtctccgttctttacccgcctgtaggcttccttcgctgaatcggtggaaaagacaatttcgacgtcctgcattctggacacgatcgcttctaacttctctaaatctactcgataatcatctacaagtccgacttttaccattatcattcccctagttacatagaatcatctttattctatcccatttcacgacataaaaagaactcttcgcgacaactttatccaactaatccagcttttcgtatatagtcattactagaaataaagataagggagattgtgacatgattacactgaccgattgcagccgcaggtttcaggataagaaaaaagtagtcaaagcggtgcgagatgtaagcttaacaattgaaaaaggagaagtcgtcggcattctcggagaaaacggtgccggcaaaacgacgatgctgagaatgattgcttccttgcttgaaccatcacagggtgtaatcacagtagacggctttgacacggtcaagcagccggctgaggtcaaacaaagaatcggtgtcttattcggaggagaaaccgggctttacgacaggatgaccgctaaagaaaatctccaatacttcggcaggctgtatgggctgaaccgccacgagatcaaagcaagaatagaagatttatcgaaacggttcggcatgcgcgattatatgaaccggagagtgggcgggttttcgaaaggcatgaggcagaaagtcgccattgccagagcgctgattcacgatccggacatcattttatttgatgagccgacaactgggcttgatattacgtcaagcaacatcttccgcgaatttatacagcagctgaaaagagaacaaaaaacgattcttttctccagccacattatggaggaagtgcaggcgctctgtgacagtgtcatcatgattcacagcggagaggtgatttaccgaggggcgcttgaatcactatacgagagcgagcgcagtgaggatttgaattacatctttatgtctaagcttgtcagggggatttcttaaatgctgagccatatttataaaaaagaaatgatcgacgctttacgcgacagaaaaacgatattactcacaatcttagtgccgatgattatgatgcttggacttgtctttttttatgaaagcatgctgtccgacaaaggggagcagtacacgctggctgtcggccattcgcttccgcccgcactggaaagcaagcttaatgagattgacgaaatcagcgtaaaaacatttgcaaagcctgaagaggcagttgatgaaggaaaagcagatgcctatctgaacgtcccgaaagagttcgactcatatgtcaacagcatgacaccttttaaggttgatgtttacggcaattcaatcgatcaagggtcgtcaaatgccatgcagcttgtgcagtctgccttagatcagtacaaaaatgaaattgtgcagcaacgtttaacaaataagcatattgatcaatcggtgatccagccgtttacaattcagcaaaaggaagcggatgaggagaaagggacttccgctattatgctttccgccattctgcccatgctgattctgacttccattgtttccggcgcaatgccgatcgctcttgatatcatggccggtgaaaaggaccgaaagtcaatcgaggcgctgctattaacgccagtcagcagaaacaaagtgctggtcggcaagtggcttgcggtttccacttttggcgtggcttcaggtgtatttgctttggtgtttttgattttgtccaccgtgttatttaccgaaaatttaaaaacggccttccagctgggagatcatatgtggagtgtaatcggcgcttcagccttaatcattgtgctctctgcattgctgatatctgcgatggagcttttcatcagcatcatgtccagctcggtaaaagaagcgcaaagttatatgtctctcgtcgtctttctgcctgtgttcccgatgtttttcatcttcagcaaggcaccgaaccaatttgacttatcatactttctcatcccgtttctgaacctgcatgcgttatttaaacagcttttattcgggatggttgacccggctaccattttgtctacgtcaggaaccatcgccgtgctcatcgccatcttctttttactagccagagcctgcttcctgaaagacaaatgggttcttccaaaataaacttgcgaaaggagaaatacactttctcctttttgtatatcctgaaaaaagaaggaaaatagaaaaaggatatctaatacaaaaagtgaccctgcactatttttcatcaaaattggtttcaaaggagaaggaacaatggatcaaacacgtacactcggcaaaacgaagctgaaggtgaagcggatcggattcggcgcgaatgcggtcggcgggcataatctatttccaaatctaaatgatgaaacagggaaggatttagtgcgcacggcattggatggcggcgtcaattttatcgataccgcctttatatatggattggggcgatctgaagaattaatcggcgaagtcgtacaggaacgcggcgtgcggaatgagctcatcatcgccaccaaaggagctcataaagaagtggacggcagcattgaattagacaatagccgggagtttcttcgcagcgaggtggagaagagcctgaagcggctgaaaacagattacattgatttgtattatgttcactttccggatggaaaaacacctctcgctgaagtggcgggcactttgaaagagctgaaggatgaggggaaaatcaaagcgatcggcgcttcgaacctcgattatcagcaattgcaggattttaatgctgacggctatttggaggtcttccaggccgaatattctctcatacagcgtgatgccgagaaagagcttcttccatactgtgaaaaacaaggcatctcctttattccttactttccgcttgcgtccggactgctgacaggaaaattcacgcaagacacagtctttgatgatttcagaaaggataaacctcaatttcagggtgaaacgtttatccacaatctcaaaaaagtagataagctgaaagcagtagcggaggaaaaacaagcggatacggcacatgtcgccttggcgtggctgttaacgagaccggcgattgatgccattattccaggagctaaacgaccggagcaattacaggataacctgaaaaccttgaacattgaactgaccgaagatgaagtgaatttcatcagcgacattttcaaataaaaaaggaaatagccgtcatggctatttccttttggtgttttattctttgatgaatgcttcgactaattctgctgctctgtaatcatccatatcaagctgccattggtcgatgtcatttttcttcattttcacttcaactgttttttcagatgaagcaggtccaagctttttgaattcctcaggatagacttgaagcgcgtatttcactgcctcttcatagctggcactagagtttttactgtagtagtctttcactttgtcttcgatgcggtctgaaagagaagatgcatctacaggtttaactgtggcttcaacaattgcttcgtctttagagattgaagtcgtttttgcttgaatggaagagtttttgcttaatccctctttaatgccgttcacgatattatcaagcgctttgctgtccgcatatgtgctggaaaggccggaagctgagagataaccgtctttggctgattcattaaaatcatttacaatttcatttttgttagcgccggtgattttttcgaaatcggcgttatctttgccgaaaagaaggacatcaacataagctgataacgcttttgcagaatcttggagcttatctgccgtcgccaggatttttttgtcttttccgtcaattttaaaagtaactgattttggctttttatcaccgtaagattccggcgtatagttaagctcgtattgcttgcctttatctacaacgaagaaaagatttccttcaacggatttgtcagcgttaatcgtgctgccctgaagcttttcgctatagtcttcagggtctgtgtcagacattttggtatcaccttgatacaatgtgaaatccatactgtctacattcagcgggtcttttcctgtgtttttcaccgcgacattgacttttaacacaagctggtcatctgaagtggacttatcatatttagacggaagtgtgtaagagacatccttgattttgacttgagctatatctgagcttttttctgtttctgattctttcttctccgcgcttgttttgctgccggaacaagcagctgtaaacatcatcagcagaagaattaggaaaacagcgtacgtttttttctgaaacattcatttttcctcctcaaatggtttaggaaaggggagtcttttgtctttgagaaatggatctttttgaatggattagcatcatataaccaaaaaaatcagttcttttctcacggttttcaccggattttctggaaactccgccctcctttgtcatgaatggacctataaaaagttacaacggaattaattttaagattattagcttttatattgaataggttcatcatcctatttttggtgaaaaatgttctggtaaaactggtaaactcagaaaactgtgtattttagactattactttttgattagttggagggaacttaagaaggatgaaaggggccgcctttgtgaagaaagagggactgaaacaaaaagcactggaaatcggccgggtgccgacacacttaaaactggaaattgaagattatggcggtgatgataaaagagctcatttttgttgggcagatcctcaggatgagaataccggcattatcgtggagcttggaccggacggagagctggaatccctttcccgtgatattgagcctgaaagcggagaaaggctgtctgaggagaaactagaggatatcatgcgccaatttgtcgagactcatcatccgggggcactctctgcctttgttcgtgaagaaaatgaccgtgcatacggcgataaagtgagattttcatatgttcaaatggaggctgggcttcctctccccatgagcggatttatggctgatgtttccttatcaggtgagattgtttacttccgttattacggcgaagcgggcagcatcatcaagccaaagcgggtcgcggatgttgaagaggcacttgcctttatcaagaaggacgtggagttcgaccttttgtttgaggttctccatcgttctgtttacaaaaacggagatgatcagccgcatttggtgtacgagcctgaaggtagggcgattaccgtacctgcggatttggttcaagaagaacaagcagttgatgatgacgatgattacagggagccggagagctttcctctccctttattcgagggcatccgcgaaaaggccgatcctgacagcatgattggtattgaaaatgggtttgtcaaagagcgggaagcggatttgggagatgggagaattggaatcgtttggcggaatccggatgaccctgtgtatcagccggcggataaaagcatggacagctggtttaagggacggactcatcaagtgctgaaaaccatctataacaaagaaaccggaaaactcgaaggcgtcatgtcatttatggagaaaaaagggccgctgacagtaaccttggcagagtgtgaaaaaatcgcgcttcgctttctatttgctttatttccgaatgccgatcaatattttaggatcagatacgacgaaaaagatgaagaagaaaacgcagtcgctggttttacgtttgaagcgcattgtcacggagttccgctccgatttgggcagatcagaatttgtgtcagccgccagacagggtatatcaccgtttatatgggaccggatattgacccaaataagctggcaaccattgatcctgtgccggctatttcagttgaacaagccaagtctatcttttggcagcattttaaagttgagcttggctgggaaagagagtacggggatgatgaagaacacagctaccggctcgtctataagccggtgtatccgcattttatcgatgcacatacaggggagcctgtcttcagcatatggtgaaacagccaaaagtcacgcaattgcctcagatatagaagagagtatgtgatgaaagtaacagaaagaatctcaaaaaacaatgacaataatagaaaaggacctttcttcactttaaatgaagaaaggtctttttatataataaacaggattctctttgtcgtagactctttgaaagggatgacttcattggttaataaacagctgaaaaagaaggcgcaggagatcggaaatgtaccgacgcattatgagcttgagatagaagattacgaccaaaagcaaaagaagtacgggcaggcatattttatctggaaggaccctaaagatccggaaaagcacattacagttgaacttagaaatgacggcgccttgctcaccttttcaacaactgtccactccgagacagacaaaaaacttccagatgccgagctgaagctgacggctcttcagtttgccgctgccaatcatcccggcacatttatgaattttcattttcaaggcaaggaagaaagggggcagcacatccggtttgtctataccaaaatggagctggggcttccgattcccaattcaggctttttaattgatatgacacgaagcggtcagattgtccactttctatattacggggaagggcataaagccgaagttccgacggaatttgtagcaaaagagaaggttgtatcccattacttaaacacaatgtcttttgagctgatgtacgatgtcattgatggcgaacaggaaccaaggcttgtatatgaaccgattctaccgggatacagctatcccgcagatgtagacgaaattgtgcccgaccagcatatcgcagatgaaagaatagaaaacacggcgccactgccgccgcttcagaacaaggaagaagttgatatatttgccttgctgggttttacctctgatatgcagaaagtcagtgaaagagactttggagaacaaattggaagcacgtggcgcaggggcgctgcgccggagcgtaaggatttaagcataggaagctattttgaaacgagaaataaaaatacaatcaaaatgaagacggataaaagaaccggaaaattaaaagcagcgctttcttttatggactggcggaacaacctccaatgctccacggaagaatgccaagagatagcgcttcaatttttgtatgccctctatccgagagcggctgagtttttcagggtgaatcccgtccgaattgatgaaagagggagagtccgcaaccatttttctgtctggtataaaggagtgccgctgcggttcggcgctgcccgcatcattgtcaatccggaaactgggttgattgacgcttttatggcgcctgatattgaacctgaacaattggaagcgataaatcacaggccggatgtttccgctgaagaagcgaaagaagcatttttagccgcttttgatgtgaaactggaatggcagcctgattttacagcaggcagtgaccagcactgcaaacttgtctataagccggtttacccttcctatattgatgcgcacataaggaaaaagaaaaggctgtgaggggtgtctagttaggaatcatctccaagtgggggtagtccttgaatcgtttccaatccccgccccattcgaaaccgagtgtcttagcgatctcgacaacctccagccaatctgattttccgttttgattgccgtcatattccatatcccatatgatgctgccatcctttttttgaagggcgaaatcaatcgctaaaccatagttatgatacgattcccctcctcttgcataggtgacaatattccctttttttgtacgtccctgtttatataattcatcttgttccttaaaggacctgaatccttcagtaatgacgacgtcaatgcctttattcgctgcagcggctttgagtgcatcggcattctgcttcacaatcggatgaagatccgaggggacaggcatgtcctgcaaggcgttttgagaatgccattcatgccgaatataactaaaacaaagatctagaagaaatagaatacataagataacaaatgtttttgcgggtaagttcatatcggtctcactttctcaagatgtgctgaatgttaacgcttttaagtgattgactctctctaaaagcgaacagctatgataaaatataacataaatagtagcaggaggaaggaggcagaccgatgagagcaaagattccatcagaagaagtagcagtaaagctgaatgaatggtacaagctcattcgcgcatttgaagcagatcaagcagaagcgttaaagcaggagattgaatatgatttagaagatatggaagagaatcaggacttgcttttatatttttctttgatggaattccggcatcgaatcatgcttgataagctgatgccggtgaaagacagcgataccaagcctccgttctctgatatgctgaacgaaattgaaagcaatcagcaaaaactcacgggcttactggaatactacttttattatttcagaggaatgtacgaattcaagcagaaaaatttcatattagcgattgaccattataaacatgccgaggaaaagctcgagtatgtcgaggatgagatcgaaaaagctgagtttctttttaaagtcgcagaagtgtattatcacatcaaacaaacgtatttttccatgaattatgcgagccaggcgcttgatatctatacgaaatatgaactgtacggtcgccgccgggttcagtgtgaatttatcatcgccggaaatttgaccgatgtgtatcatcatgaaaaagcactgacccacttgtgcagcgctttagaacatgccaggcagcttgaagaagcgtacatgatcgctgctgcctattataatgtcggacactgtaagtacagtctgggtgattacaaagaagcggagggctatttcaaaacagccgccgccatttttgaggagcacaactttcagcaagctgttcaagctgtattttcactgacccatatctactgtaaagagggaaaatacgacaaggcagtagaggcttatgaccgcgggataaagagcgcggctgaatgggaggatgacatgtacttgacgaaattccgcctcattcatgagctgtatcttggaagcggcgacctgaacgtgcttacagaatgctttgacctgctggaatccaggcagcttcttgctgacgccgaagatctgctgcatgatacagcggaacgtttcaatcagttggaacattacgagtccgccgctttcttttaccgcaggctgatgaatattaaaaagaagcttgccgagcagcgttttcaataggaaatggcagagaactacaggttctctgctttttttgtgctgttttcaactcggaaaaacagggtattttccactgcatagtgagaaacagaggaggatatcaagtatgtacaaagatttaaccggaaaaacagcgattgtgacagggtcttcaaaaggaatcgggaaagccattgcggaacggttcggaaaggagaaaatgaatgttgttgtaaattaccacagcgacccgtctggagcagatgaaactctggaaatcattaagcagaacggagggaaagccgtctcagttgaggcggacgtgtcaaaagaagaggggattcaggcgctcttggacacagctttagagcatttcggcacgctcgatgtgatggtaaacaactccggttttaacggcgttgaggcgatgccgcatgagatgagtcttgaagattggcagagagtgattgatgtcaatgttaccggaacctttctgggagcgaaagcagcacttaaccacatgatgaaaaacaatatcaagggcaatgtgctgaatatctcaagtgttcatcagcagattccgcgccctgtaaacgttcagtattccacatccaaaggcggcatcaagatgatgacggaaacgctggcgctcaattatgcggataagggaatccgcgtcaatgcgatagcgcccggcaccattgccacagaatcaaatgttgatacgaaaaaggaagagagcaggcaaaaacaattgaaaaaaatcccgatgaaagccttcggaaagcctgaagaagtggcggcagcagcagcttggctcgtatctgaggaagcaagctatgtgaccggcgcaacacttttcgtcgacggcggaatgacactttatccatctcagcttgaatagaagacaaaacagggggattgcgggatgaaaacagactggtggaaggatgcagtggtgtaccaaatttacccgagaagctttcaggacagcaatggagacggaattggggacttgcgggggattatttcccgtcttgactacataaaggagctcggggcagatgtgatttggatttgcccgatctatccttctccgaatgttgattacggctatgatgtgacaaaccataaggcgattatggattcttacggaacaatggacgattttcacgagctgctggaccaggtgcatcagcggggattaaagctggtgatggactttgtgttaaatcacacctcggtcgagcatccgtggtttaaagaagcggagctggacaaaaacagcaaataccgtagctattattattggcgtcccggcacaaagaacggcccgccgacggactggctctcaaactatggatgcccggtctggcaatacgaagagcacaccggagaatactatctccatatgaatgccgtcaaacaagctgatttaaactgggaaaatcccgaagttcgccaggcggtgtatgacatgatgaaattttggctcgataaaggggtcgacggtttgcgaattgatcagctccatctcatttctaagaaagaatatcttccttcgtatgaggactatatcaatcagcaggcagagccgaagccctttcagccaaatggcgaacgaatccatgactatttaaaagaaatcacagatgaagtgttttctcattatgatgtcatgtctgtcggagaggtcggcagtgtcacaccggaagaaggcctgaaatatacgggaacagataagcatgagctgaatatgatttttcactttcagcatatggagcttgatcagcagcccggaaaagaacattgggatttgaagccccttgagctttctgatttaaaatcggttttgacaaaatggcaaaagaagcttgaacatcaaggctggaatacattgttttggtgcaaccacgaccagccccggattgtgtccagattcggagacgatggggaataccgcaaagcatcagcgaaaatgctggcagccgtaatttattttatgaagggcacgccgtatatttatcagggagaagaaatcgggatgacaaacgcgccgttcacccggattgaagactacaaagatatccaaacgatcaatatgtatcataaacgggtgtttgaaaaaggctatgatccaaatgatgtgatgagatcgatcttagccaaaagccgggatcacgcccggaccccgatgcagtggaacagcggcaaaaatgccggatttactgacggcacgccttggctgaaggtcaatccgaacttcaccgcaatcaatgtggaggaagcgcagggagatcctgattctgtcttaaactattacaaaaagctgatcagcctgagaaagcagtacgctgacctcatgaaagggagctttgatcttttgcttccggacgatccgcagttgtttgtatacatgagagaaaacagtaaacaacagcttttgtcggtcaataatttttcaaaagagcaggctgtttttcagtggcctaagaactgcggcaaagctcaggcctcactgcttctcagcaattataacaacgatgatcttgatgacgaaatggtgttccggccttatgagagcagggtctatcttctggacaaaacaaactaatgattgaagtagcccggcatttttagccgggtttttttagtacatatattcgctctgcaggcgggaagaataaatgaaaatgaaatttattcttgcaaaacgtaatgacttcggtttattatgatataggattacaaaatcgttatcattttgatttaaagttactgaaaaagaggggatatacgatatgtttaaaaaatggagcggtttgtttgtgattgcagcgtgctttttattagttgcagcatgcggcaactcatcaacaaaagggtcggcggattcaaagggtgataaactgcacgttgtcacaacgttctacccgatgtatgaattcacaaaacaaattgtaaaagacaaaggcgatgtggatctgttaatcccatcttccgttgaaccgcatgattgggaaccgacgccgaaagacattgccaacattcaggatgctgatttgttcgtttataatagtgaatacatggagacatgggttccgtcagctgaaaaaagcatgggccaaggccatgccgttttcgttaatgcaagcaaaggcattgatttaatggaaggctctgaagaagaacacgaagagcatgatcatggggagcatgagcacagtcatgcaatggaccctcacgtatggcttagccctgttctggcacagaaggaagttaaaaatattacggctcaaatcgtgaagcaggacccggataacaaagaatactatgagaaaaatagtaaagaatatattgcaaaactgcaggatcttgataaactatatcgtacaaccgcaaaaaaagcggagaaaaaagaatttatcacgcagcatacagcttttggctatctggcaaaagaatacggcttgaagcaggttccgattgcagggctttcacctgaccaagaaccgagcgcagccagcttggcaaagctgaaaacatatgccaaagaacataatgtaaaagttatttactttgaagaaattgcatcctcaaaggtcgcagatacgctcgccagtgaaatcggcgcgaagacagaagtgctgaatacactggaaggcttgagcaaagaagaacaggataaaggtttagggtatatcgacattatgaaacaaaacctcgatgccctgaaagattcactattggttaaatcataagatagtgtgcgccggaggggtgcacactatttctttgtgagaaaggaagattaacatgaatctcgtctcattgaaagatatcgttttcggctattcccatacgcctgttttagataaagtatcacttgatattgaaagcggtgagttcgtcggcatcactggaccaaacggcgcctctaaatcgacgctcataaaggtaatgctcggcatgctgaaaccgtgggaaggcacagtgacgatcagtaaaaggaatacagaagggaaacgcctgaccatagggtacgtcccgcagcaaatttcttcatttaatgccggatttccgagcacggtgctggagcttgttcagtcaggccgctatacaaaagggaaatggtttaaacgtttaaatgaagaagatcatcttgaagtagaaaaagcattgaaaatggtggaaatgtgggacctccgccatcgtaaaatcggtgatttatcaggcggacagaaacagaaaatctgtatcgccagaatgctcgccagcaacccggatctgctgatgctggacgaaccgacgacagctgttgattacgacagcagaaaaggattttacgaatttatgcatcatctcgtgaaaaatcacaaccgcacagttgtgatggttactcacgaacaaaacgaagtacagcaatttttagataaagtgattcgattagagagaggagaaaaaggcggatggaaatgtttgacttggaattcatgcgacgagcttttctagcaggcggcatgatcgccgtcatggctccgatactaggagtgtatctcgttctcagaagacaggccttaatggctgacacactttcacatatctcattgtcaggtgttgccatcggcttttttctcagcaccaatataaccgcagcaagcatagtcgtcgtgaccatcggcgcgatcggaattgaatacatgcggcgggcgtatcggacttattcagaagtgtccattgccatcttaatggcagctggtttgtccttcgcgatgtttttaatcagcctttccaaaggcacagccaatatgagcatcgatcaatacctatttggatcgcttgtgacagtaaaccagcagcaggtctatattatcagtattatcacactgctgatcctgctttattttattgtactgagaaggccgctctacctgctgacgtttgatgaagctacagccaaaacatcgggaatcaatacaaacgttctctcgttgtcattcagtattgtcacaggccttgcgatttcagtcattattccgatcatcggggtccttcttgtatcggccctgctcgtattgccggcagccttcgccatcagaattgcaaaaggctttaacatggttttcattacagccatactcatttcattattcagcgtatttacgggactgacatcatcctatcagctcgggacgccgccaggtccgtctattaccctgctattgatcgttttgctattaatcggatttgcagttcagggagtttggacgtttatcaaaaaagaagctcagcgcaaaaaaagaagccgataacatgaaaagcagttttccctagggaaaactgctttttttatagaaacaattcggcaaggcgctcataagattcttttttcgcctcaaaatcaaacacattgcacagaaccatgatttcatttgtttcgtagcagcctgtgaggtctaacagctgttgtttgacagtggtgggagaaccgatcaccatccgctttctgttttcttctatgagttttttatcggacgctgtatagggatgagctttcgcttcctcgatgcttggcacgcggctgtccaagccttttccgacgcgaagaagccacagatcctggcttaatgcgagttcttctgcctcttcatctgtttttgcgcaaatgacaaaaatcgtaaacagtgcggatggattcgaaaaatgggctgagggccgaaagctttcccggtagatgcggaatgcattttctcctcgctcgggattaatgaaatgcccaaatacatatccaatcccctggtgcgccgcgcgtcttgcgctgttttcaccaagaccgagcacccatagctcgggtgccgtaccaataaggggcgccgctttgattccggcatacggatggtcgggaggaagggaatctgttagaaaataagagacatcctgcagctgtctgttaaattcggttaagctttttttcaccccgtccgttaatgcaagtctggtttttgtcgtgccgccgggggagcgaccgacgccgaggtcaatccggtttggatacagggcctcaagctggcgaaaggtttcagccactttaaatgggctgtattggggcagaagcacgccgcctgatccgacacgaatggtgtttgtctgtgctgcgatgcgggcgatcatgatttcaggcgctgtgcttgccagtcctttcgtgctgtgatgctcggcaaaccaataacgcttatagccccactgttcgcttaattgggcaagctcaaccgaatgctggagagttgtcacagggctttctcctttagaaacaggtgcctgatcaagtatgcttaaatgaatcaaaaggccgcttcctttctgtctgtttttagatggtgacaccagaataggcaaaatgacttgcccgcgtcaaatggtttgtttaagaagcgcactttatagcatttgcaaatcatatatcaaatatggaagttttttttcgaggtttttcgtcaattattcttaacttttacgaaactttgatataataacaaacgtatatattagtaatttacggcttattttccttgtgagcgtaaaaataaatgtgactatcttcacattttgatgagtaggagtgaatcgtgtggcaatttctttagaaaaaggtcaacgaattgatttaacaaaaggaaaagccggtctgtcaaaattgatggtcggtctcggctgggacccagtgtcctcaggcggaggattcttcagcaaactgcttggcggaggcggtccgaatatcgactgtgacgcttcagtgctgatgctggaaaacggaaaattcaccgataagaaaaacctgatttatttcggcaacctgaaaagccgctgcggcggtgtacagcatacaggcgacaacctgacgggtgacggtgcgggcgatgacgagcaaattatgatagatttagataaagtgcctgaaacatcgataagcttgtatttgtagtgaacatttacgattgtgtcagaagaaaacaagatttcggcatgattcaaaatgcgtttatccgcgtagttgatcaatctaatcacgaggaaatgctcaagtacaatttgagagacaattacgccggcagaacaagcctgattacagcagaaatctaccgcagcggcagtgagtggaagtttgcggcggtcggtgaaggcacaaacgatacgagattagaagatattatcagtcgatacgtataaaagaaaaggagtggatgaaacatgacaatttcattggcaaaaggacaaaaagtagatttaacaaaaacaaatccgggtctttcaaaggttgttgtcggtttaggctgggatacgaacaagtatgacggcgggcacgactttgatcttgactcaagtgtgtttctgttagacgccgcgggcaaatgcgcgtcaccaaacgactttattttctacaaccagcttgaaggcggcaacggttcagtcgttcattcaggcgacaacctgactggtgctggcgaaggcgacgatgagaatgtaaaagtaaatctcagcgctgtaccggcaaacattgataaaatctcatttgttattaccattcacgatgcagaagcgcgcagccaaaactttggacaagtatcaaacgcgtttgtccgcatcgtaaatgaagaaacaaatgaagagctcatccgttacgatcttgcagaagatttctctattgaaacggcaatcattgcaggggagctttacagacataacggcgagtggaaattctcagcaatcggctcaggctaccaaggcggccttgcccgcattgcaacagactacggtttgcaagtcggttaagacaaatacgaagagcagaaaggagagaggcagtatggccattcaattatcaaaaggacagcgcattgatttaacaaaaacaaatccgggactgactaaagcggtgatcggcttaggctgggatacaaacaagtactccggcggacacgattttgacctggatgcttcggcctttttagttgatgcgcatgataactgcgtaaatgatctcgatttcgtcttctataataaccttgaacatccgagcggcggtgtcatccatacgggtgacaaccgcacgggtgagggcgacggagatgatgagcagattatcgttgatttctcaaaaatccctgctcacattgagaaaatcggcatcacagtgaccattcacgacgctgaagcacgcagccaaaactttggacaagtttccaatgcatttgtccgcgttgtggatgaagaaacgcagaatgagcttcttcgcttcgatttgggagaagacttctccattgaaacagctgttgtcgtttgtgagctttacagacacggcggcgagtggaaattcaatgcaatcggcagcggattttccggcgggctggctgcattgtgccggaattacggtttgcaagtgtaagcgagtgacaaatagagaagtcaccgtttcaaattataggaggaaaaaacttggactttttacatcatattttgtctacgtatgcttcatttttcgattggaaaatgtggggggaagttctgactgatcctgtttcctggggtttgatcggttcccttgttgttctggaaggccttttatcggccgataacgcgcttgttcttgcggtcatggttaaacacctgccggaaaaacagcggaaaaaagcgttaacgtatggtttgtttggagcttatattttcaggtttattttcatcgggctcggtatgcttctcattaaattctggtggatcaaggtgcttggcgcgctttacctggcttggctcgtcattaagcacttctggataggcgaaaaagaagaggaagcggacggcatgaagaaaaactcttggatggtccgcacgttcgggatcttctgggcgactgtcatttcagtagaattaatggatcttgccttctctgtggacagcatcctggccgcgtttgcagtatctgaaaaagtatgggtgcttctgattggcggtatgcttggtattttaatgatgcgtacagtggcaaaagtgttccttgtgctgattgataaaattcctgagctggaaaacacagcattcgtcttaatcggcattatcgcgctgaaaatggcggggagcgctttccattacgaaatgccgcactctgtattcttcattatcattatcgctgcatttgcggtaacattgatcattcactacatcaataaacaaaagcaggtgcgcgaacaaacagccgcttcaaaagaagaataaaacaaaacaaggagggaggttcaatgtccttccttttttgttaccgaaatatcgtttcaatgacaaaccggaaaggaggatatgatgagacaagaagaactaaccattcataaagcacttccggctgatggcgattggaaaagcctgctgtttcagccattgccggagcgggatcactatgaaactgcacaaggcctttctttttctcgtcttgccggtcagatattgggcacgcctattgatgagacggactactataacgagctgtatgagctgtctgtaaacgaccgcataacgattttgagtgaaacgcttgataaaacaatcgaaccggaaacatttcaaaagcttcagcatattcattccatcaatcagaaagaaaaagggctgtcagtcagccgctttgttgcctttctggacggggaaaagctgattgcgaagcactcaaatcccttgatgcaccgccatttaagaaaagcgttgatgacgcttttacatacctttgcggacagtcatgaaaaggggctgaatcatcctgattttcgcagagtgctgcttgatgtctcgaagttttccttaaaccatctgaacccttggctggaaaaaaccgatatagagcgggagatgccgaaggttgtttggtatggagatgcgacgaaaagccagctctatttcttatattatctgatgctggtcggctgtgatgtactgctgttccatccggcgggaacggatcagctggcgcttgtcgacccgaagcaggagctcggttttacggaaaagctcccggatgtttcggagcttcagccgtttccgaaagaaaaaccagaccggaaatcaacagtggcttaccgctcaacaaaggaaattgaacatgtgctgaatcacgaggaatccatgctatataagccgtggcagttcagagatcacacaccggtgtccgttacgctgaaaacgacctatgatgaattgtttttaatcacgaaagaacgcgcctttattcggccgaatttcaaagctgataaacattccattgagattccgaatgtattcgccaaaattatgggcgtgtcgaaagacaataaggaatattggaacaggcttcatactctagcggattatcaggaaacagaaatggtcagaagctttccatttacagaagaaataaagtcgaactatcaatttcactacagccacgcacttgatcaagaagggaacattgatccggacaagctgatggcaagcaatgtgtggcagtacaaacagctgccggcgggcgttcagactgccattgccaaaacgatttcgagaatgtgcaggtacccgcggcttaaagccttgcatcaggaacaagtcaaggatgttcaaatctatttgtttaaacaaacaacaaacctgcctgctaatctgctgaaattgattcaaatgttcgactatgcgcaaaccgttccgaaactcgttttatatcatacggaaatgagcggcggactcacgcgttcggatgctgccgccctgctgttcctgaatgaaatcggaatcgatatcatcatttataatccgcccggacaccaagatattgagcagtttattgaagaggatcagtatgatatccactggctggatgacatggtgtttcagcaggactacaaagagccttcgcttgtgaaaaggctcttcagaaccattacccaaaaataaggagagaagaaaagcatgacaacagaaaatcaaaatccgcttgttctcgataaaaatgaagagatttcccagcaaaaagctgacgatatccgtcttcagctccgtcaggaaccagaagtgaagcggcttgctcaacaaattgacgtcaaaaaccaaatggagctgcttgagtacggcaaggagccggccgttgaaatatccaagttctctgaccgcatcttggggatgatgaaaacaacaagcgtgacagactccggcacaatgctgactcagcttgggaaaatcatggaccgcttcgacaaaaatgattttgatgagccaaagggattaatggcgaaaattttcaaacgcggcggcagcatgattgaaaaaatctttaaaaagtatcagacgcttggcggagagattgaaaaaatccacgttgagatttcaaaatacaaagatgagatgacgaagacgaactacacgctcgatgaaatgtatgaaaacaatatcaaatactatatggagcttgaaaaatacgtcgttgccgggcagatgaaactggaagagatgcagtcgatccttccttcatatgaggaaaaagcggcaagcgggaaccagctggcgcaaatgcagctcgatacgttgcgcaacggcattcaggcgcttgaggaacgggtgtatgatcttgacatggcacggatggtggcgcttcaaaccgcacctcaaatccgtctcctgcagcgaggaaatgcaaagctgatcgggaaaatcaactccgcgtttatcattaccattccgattttcaaaaacggcattattcaggctgttacggtaaagcggcaaaagcttgtggctgattccatgagcgagcttgaccgccggacaaacgagatgctgaaacgaaatgctgaaaacatctcgagccaaagtgttgaaattgcgagaatggccggcagaccgagcatagatattgaaacgattgaatcgtcttggaacacgattgtcagcggcatgcaggaaacaaaacaaatcgaagaagaaaacaagcgcctccgcgaagacggcgcgagacgaattgcccagcttcaggataatattaaaaaagcagcattgcagcaataataaaaaccccgcttgtggaacataagcggggtatttcaattacatcatttagttaatgacaatgtgtaaagacaggtgtaaacttaaacggtaatcattttgcatatcagaggtgttggcaatgggaaaacaacagcctatatcccagcgtaaactgctgggcgtcgccggtttggggtggctgtttgatgcaatggatgtcggaatattatcgtttattatcgccgcgctccatgtagagtggaatctgtcgcccgaagaaatgaaatggatcggaagcgtcaattccatcggcatggctgcgggtgcgtttttgtttggtttgcttgctgatcgaatcggccgcaaaaaagtgttcatcatcacccttttatgcttttccatcggaagcggcatttccgcttttgtgacgagcttatcggcatttctaatccttcgtttcgtgattggtatgggacttggcggcgagcttccagtcgcttcaacactcgtttcggaagcggttgtgcctgaaaagcggggcagagtgattgtgcttttggaaagcttttgggccgtgggctggctcgcagcggccttgatttcttactttgtgataccaagcttcggctggcaggctgcccttctgttaactgcgctgactgctttttatgcgctgtacctgcggacgagtctacctgattcgccgaaatatgaatcgctttctgccaaaaagaggtcgatgtgggagaatgtaaaaagcgtctgggcaagacagtatatacggccgacggtgatgctgtcgatcgtttggttctgtgtggtgttttcttattacggcatgttcctatggctcccgagtgtcatgctgctgaaaggcttcagcatgattcaaagctttgaatatgtcctgctgatgacgcttgctcagctacctggctatttctctgccgcatggctgattgaaaaagcgggccggaagtggatactcgtcgtttacttgattggcacagcaggaagcgcctatttcttcggaacggcggattccttaagtcttctgcttacggctggagtgctgttatcgtttttcaatctcggtgcgtggggcgtgctgtatgcttataccccggagcaatacccgactgcgattcgagcaacaggttcaggaacgacagcagcgtttggaagaatcggcggcatcttcgggcctttgctcgtcggaaccctggcagcccgtcatatttcgttttcggtcatcttttcaatcttttgcattgcaatcttacttgcggttgcttgtattttgattatggggaaagaaacgaaacaaactgagctagaataggaaaagcacctcttaaaagaggtgctttcagcgtgtcgacaaaccctcgcattcgttgtcaggactgcgcttcggtgctcaatgcgaagtggatcaacggctaaattctcaggcgtcctgcctaaacgccgtcgtcatcacatcctgtgaatgtccgctcctatgctcgtccttcctagacttcaagggttttcaatcacgctgaaaagattttgtcaacaatctgaggcacctcttgaatgaggtgcttttttacaattgcgcccgggctgtggattggcgtttcccggttttactgattgtctggtagagcgtcatagaaagtatgaacagaatggcagtaaatcctgtgacagctccgaaatgctgtgtgctttgatataaaaaacctgcaatacttgtaccgacagtggttccggcatacatagcggcattggaaagggaagcgatggttcctcgcgcatttggtgcaatggattgaaagacacccatcattaacggaaagatgatgccagctgtaaagaacgtgagaaaaaagccggcttctactaaaaacaagtttggaaagaacggaagagcgaaatagagagcgcccattagcagcatcccgctgatcagtgttttaaacatgcccagcttttctgaaacccggctgccgataaggctcccgagcatatttcccagtccgagtacaagcatagctgcgccaatttgtgacacggttaaatgataatccgcggaaagccaagtacccagaaagctgaacgatgcgaagtttccggtttgaaacagaaaataggcaagcagaatgaccgatgttttcggcaatgaaaaaagctcccgataggggttgacaattgatgggcgcgccaatggttcagaaggccggatgccaggcatgaccgccgccaggatcaatagaagaataagcgagcacgctgacaaaacgaaaaatggcgtatgccatgtaaaggaagcgagaaaccctccaataggaagtccgagcatttgtgaagcggccaaacctgctgtcgcaatccccatgccttttatgatctgagaaggctggacaatgactgggatggacgcccaaatttgaggcgtcacaaacgcagcgctaacgcctgcggcaaaacggaacaggcacatggcggcaaaagagggagcgatgccgcataaaaatgtggatacgataaagcctgcaagtccccacagcatgactgttttcctgttcagccggtctgagattgggcctgcaatgaaagcgaagagtgcataaccgagtgcataagcactgaccatccagcctgacaaatcagtagagacatgaaactgatcctgtaaaagggggagaagcggcgaaagcaaaaaggtatccgtgccaatgacaaacatgacactgaagaaaagccaaatgcgattcaaattttatcactcctattgttttataactttaaaactatgaaacagatatgtatagagaaaaccctttgttagagggtttccaaaaagccaggcaggtatgtttgaaatgtgtcttcacgcagactgacgtattttgtccgcgaatctttccgggttgccgtcaatcccgcttcacgcagcgttttaaaatgataagatgccgtggttttgacaatattgcacttttcacctacttcaccgcagctgagttcttttccgctgacataaagcgtacgaataatggcaagccttgattcatcagacagtgctttaaaaatttgcgctctgatttgatcatctgattgtttcatagtcatgaaactataatacataatgggtgttgaaaaagcaacttatttttccagtaaaggagcaggaagtcataagaggaaggaggaattcaattccaataaaagcgttttcaactaaaggtaggagaaaaatcacccgtaaaatacaatcatataggaggattacagagcatttagaagcataaataagatcatgtggtcacatggatgtttataaagaaatggtacagaataaaagagaatatgctgtttgtgtgggaagttacataaatgttacggtaataaagattgcttaatatggagggaaaatatgagtgtagatgagaaaccaattaagataaaagtcgagaaagtctctaagatttttgggaaacaaacaaagaaggcagttcaaatgcttgccaacggaaagacaaaaaaagagatcctgaaagcaaccggatcaaccgttggggttaatcaggcagattttgaagtatatgatggtgagatatttgtcatcatgggtctatcagggagcggtaaatcaactttagtacggatgttaaaccggcttattgaaccgactgccggaaatatttacattgatggtgacatgataacaaatatgtcaaaagaccagctccgggaagtccgccggaaaaaaatcagcatggtcttccaaaagttcgctctgtttccgcacagaacgatacttgaaaacacagaatacggactggagcttcaaggtgtagacaaacaagagcggcagcaaaaagcgcttgagtctcttaagctcgttggactggaaggatttgaacaccaatatcccgaccagctttccggcgggatgcagcagcgtgtcggccttgcccgcgcgttgacgaatgacccggacatccttctgatggacgaagcgttcagtgcgctcgatccactgattcgtaaagatatgcaggatgagcttcttgatcttcacgataatgtcggaaaaacaattatctttattacgcatgacttggacgaagcgttgcggatcggcgacagaattgtcctaatgaaggacggcaacatcgttcaaatcggcacgcctgaagaaatcctgatgaatccatctaacgaatatgttgagaaattcgtcgaagatgttgatttgtctaaagtcctcacagcaggccacattatgaaacgcgctgaaacagtgcggattgataaagggcctcgcgtagcattgacactgatgaaaaaccttggaatttcttcaatttatgcagtggataaacaaaagaaattattaggtgttatctatgcgtctgatgcgaaaaaagcggctgagtctgatttgtcacttcaagacatcttgaatacagaatttacgactgtaccagagaatacgtatctgactgagatttttgacgttgtgtccgatgcgaatattccaattgcggttgtggatgagaagcaaagaatgaaaggaattgtcgtaagaggcgcgctgattggcgcacttgccggcaataacgagtatatcaatgctgaaggcactaacgaacaaacacaagatccttctgcacaggaggtgaaataagatggatagactgcctagaatacctttagcagatattattgaccgttttgttgactggattacgatgacgtttggcggattcttcgacggaatcgctaacggattggccgcttttgtaaatggaattgtcaccggtcttggatttattccatctattttgttaacgattattttcgccgcacttgcgtggtggatcagtacaaggggaattgcgttatttacgttgattggattcctcctgatcgattatttaggatattgggacccaatgctgcaaacattggcgcttgttttgacatctgtgattatttcgattgtggtcggggttccgatcggaatttgggcgtctcagaaagaaacggttcgccgtattgtaacgccaattcttgatttaatgcagacaatgcctgctttcgtatatctattgccggcgattttcttctttaacatcggtgttgtgccgggtgttgttgcatctgttatcttcgcgatgccgccgacaatccgcatgactgttctcggtattaaacaagtgccggcggatttgattgaagcgactgaggcattcggttctacaacagctcagcgtttgtttaaagttcagctcccgcttgcgacaaaaacgattttggccgggatcaaccagagcatcatgcttgcgttatcaatggttgttatcgccgcaatggtcggtgcaccgggacttggttctgaagtatacagtgccgttacacagctgaaaaccggggtcggagtagaggccggtatcgccatcgttatcgttgccattaccctggaccgtattactcaaaatattaaagtgaagaagaaaagcagggggaatgcctgatgcttaaaaaaatcataggcatcggcgtttccgccatgctggcgctctcacttgcggcttgcggttcagaaaacgatgaaaatgcatccgcagcagaacaagtgaataagaccatcatcgggattgaccccggttcagggattatgtccctgactgacaaagcgatgaaggattatgacctgaatgactggacattgatttcagcgtcaagtgctgcgatgaccgctacgcttaaaaagtcatacgaccgtaagaaaccgattatcattacaggatggacaccgcactggatgttctccagatataagctgaaatatctcgatgatccgaaacaatcttatggcagcgcagaggaaatccatacgatcacacgcaaaggcttcagcaaagagcagccgaatgccgcaaagcttctgagccagtttaaatggacgcaggacgaaatgggcgaaatcatgatcaaggtggaagaaggcgagaaacctgccaaagttgctgctgagtacgtcaataaacacaaggatcagattgccgaatggacaaaaggcgttcaaaaggtgaagggagacaaaatcaaccttgcctatgtggcgtgggacagtgagattgcaagtacaaacgtcataggcaaagtcttagaagacttgggctatgaggtaacacttactcaggtagaggctgggccgatgtggactgcaattgcgacgggaagtgcggatgcatccctttccgcatggctgccgaatacccataaagcatacgccgctaaatataaaggcaaatatgatgatattggcaccagtatgactggtgtgaagatggggcttgttgttcctcaatatatgaaaaatgtcaactcaattgaagatttgaagaagtaatcaaaaaagcagcctgtgtcaggctgctttttttgcgttaagaagcgttagcggcagcaagtgattccgccttctgaaatgttttgagcacggcgttcgccaaaatatgaatgccggtaaacatcgcatttctgtcaaaggtcatgtgcggatgatggagccccggctggagcccgcagcctagtccgagcatcgttgttttcagattcggcaccttcacggcgtaaaaatggaaatcctcgccgccggtggtgacaagcgggtcatcaagccgctcagccccgatgatttccgtaatggcttctgccatgatcgcttcagcttctttattttgtgttgccgcaggaaggctgtgttctttgtgcagctcgatctttgcgccaaatgcagcggcggccgcttcacaggctctttctgtttcggcgattaatgcctccatggcttcattggtctgtgcgcgcaaatcaaggctgaacgatgcttttcctggaatgatgttagagctttcaccgccggcttgcagttttgtcattttgacggtatgcgggatttgcgggtcaatatgaatgagtccgagcttgtgtacaagaaatgccgcaatttcaatgctgtttttcccgaggtgcggacgggcgccatgagcctcttccccgatgatcgttccctcaatgtgctggcttgatccgtgcagaatagaaggagcgcagcggccgttctgtgtttcctggatcggacggacgtgaacgccatacaaatagtcgatatcatcaagcacgccttcttctatcattttcaaggcgccgccgcctttttcttctgccggctgaaagataaaacggattgtgcccttcggaagctcaggttgtttttttagcagcattaacgtgcccaatgccattgtcatatgtgaatcgtgtccgcaggaatggttggcgcgaaatgtgccgttaacctcctgccacagcgcgtcaatatcagcgcgtaccgctacaacaggtgagcctgagccgatttcgccgacaaccccggtgcagtctgaaaacgtgcgcgtccggcaccctaaatcctcaagcttttgtttcaaaaatgaagttgtctcatattccttccagctgacttcagggttcgcgtgcagatgctcgaagatgtccataatggtttgtttcatttcttctgaaagcttttgcatggtaagaaatacctccttctatcagaatgaatttttaccttctttactttatttatattgaaacaggaagataggctgtatataatatagcacatattgctactattcagaataattaatattttcaaacagaggggatggatcgaaatatgagtatgccagcagccgaaacacagcctaagaaaaaacgtatgacatttaaaatgcctgacgcctatgtcctcttatttatgattgctttcatttgcgcaatcgcttcatatattgtgccggcaggtgaatttgaccgcgtgacaaagggggatgtcacgaccgctgttccgggaagctatcattcaattgaacagtctccggtcagattgatcagcttttttacttctctacaggatggaatggttggatcagcacccatcatctttctgattttattcacaggcggcaccattgctattctagaaaaaacgggtgccatcaatggcctgatttacaatgtcatcagcaaattccgcacaaagcaattattatttatttgtattgtcggcgcattgttctccattctcggaacaaccgggattgtcgtgaattcagttatcggttttatccccatcggcctcattgtggcacgatccttaaaatgggacgcagtcgcgggagccgctgttatatacatcggctgctacgctggatttaactccaccatattatcaccgtcaccgctcggtttatcacaatcaatcgcggagctccctcttttctcaggaatcggcctgcgagttgtgatatacatatgctttttgctgtcttctattatttatatctatttgtatacgagaaaattaaaaaaatcaaaagatgccagtgtgttaggaacagattggttccctgcggcaggaatgggcgaagccggtaaagaagaagatcagtcagtgccgtttaccgttcgccataagctgattttggctgtggcgggactctcacttgtcggatttttatacggcgctttgaagcttggctggtcagattcccaaatggctgcgacatttatttttatttctgtccttgccggtttaataggcgggcttgcggcgaacgatattgccaaaaccttcattacgggctgccaaagtcttgtatacggggcgctgattgtcgggatggcacgaagcatttccgttatccttgaaaatggaaagcttctcgatactgtcgtcaatgctttggcttcacttttggatggattcagcccgattgctggggcaatcggcatgtatatcgccagtgcgctgcttcattttctcatctcttcaggttctggcgaagccgttgtatttattccaatcctggcgccgctcgctgatttgatgggaatcacgagacaggttgcggttgaagcggttatgcttggagaaggggtcgtcaactgtgtgaacccgacatccggcgttctcatggcggtgcttgccgccagcggtattccgtatgtcaagtggctgcggtttatggtgccgcttgctctgatttggttcttgatcgggcttgtctttatcgtgatcggagtcatgatcaattgggggccgttttaacgattgctgcccgccggcttgtacggcgggcttttgagttattcattgcagaagcgcaggctgttattgtaacatgtaagccataagccattcgtaaaagtgcgggaggaaggtcatgaataatctgcgtaatagactttcaggcgtgaatgggaaaaataagagagtaaaagaaaaagaacaaaaaatctggtcggagattgggatgatagcgggagcatttgcgctgcttgatgtgatcatccgcggcattatgtttgaatttccgtttaaagaatgggctgcaagccttgtgtttttgttcatcattatcttatattactgcatcagggctgcggcatccggaatgctcatgccgagaatagacaccaaagaagaactgcaaaaacgggtgaagcagcagcgaatagaatcaattgcggtcgcctttgcggtagtggtgcttacgatgtacgacagggggattccccatacattcttcgcttggctgaaaatgattcttctttttatcgtctgcggcggcgttctgtttctgcttcggtatgtgattgtgaagctggcttacagaagagcggtaaaagaagaaataaaaaagaaatcatcttttttgtttggaaagcgagggaagcgttcacagtttcgggcagctttttttataggaacattgatttgtattcactctgccaagttgttttgatagagtgattgtgataattttaaatgtaagcgttaacaaaattctccagtcttcacatcggtttgaaaggaggaagcggaagaatgaagtaagagggatttttgactccgaagtaagtcttcaaaaaatcaaataaggagtgtcaagaatgtttgcaaaacgattcaaaacctctttactgccgttattcgctggatttttattgctgtttcatttggttctggcaggaccggcggctgcgagtgctgaaacggcgaacaaatcgaatgagcttacagcaccgtcgatcaaaagcggaaccattcttcatgcatggaattggtcgttcaatacgttaaaacacaatatgaaggatattcatgatgcaggatatacagccattcagacatctccgattaaccaagtaaaggaagggaatcaaggagataaaagcatgtcgaactggtactggctgtatcagccgacatcgtatcaaattggcaaccgttacttaggtactgaacaagaatttaaagaaatgtgtgcagccgctgaagaatatggcataaaggtcattgttgacgcggtcatcaatcataccaccagtgattatgccgcgatttccaatgaggttaagagtattccaaactggacacatggaaacacacaaattaaaaactggtctgatcgatgggatgtcacgcagaattcattgctcgggctgtatgactggaatacacaaaatacacaagtacagtcctatctgaaacggttcttagacagggcattgaatgacggggcagacggttttcgatttgatgccgccaaacatatagagcttccagatgatggcagttacggcagtcaattttggccgaatatcacaaatacatctgcagagttccaatacggagaaatcctgcaggatagtgcctccagagatgctgcatatgcgaattatatggatgtgacagcgtctaactatgggcattccataaggtccgctttaaagaatcgtaatctgggcgtgtcgaatatctcccactatgcatctgatgtgtctgcggacaagctagtgacatgggtagagtcgcatgatacgtatgccaatgatgatgaagagtcgacatggatgagcgatgatgatatccgtttaggctgggcggtgatagcttctcgttcaggcagtacgcctcttttcttttccagacctgagggaggcggaaatggtgtgaggttcccggggaaaagccaaataggcgatcgcgggagtgctttatttgaagatcaggctatcactgcggtcaatagatttcacaatgtgatggctggacagcctgaggaactctcgaacccgaatggaaacaaccagatatttatgaatcagcgcggctcacatggcgttgtgctggcaaatgcaggttcatcctctgtctctatcaatacggcaacaaaattgcctgatggcaggtatgacaataaagctggagcgggttcatttcaagtgaacgatggtaaactgacaggcacgatcaatgccaggtctgtagctgtgctttatcctgatgatattgcaaaagcgcctcatgttttccttgagaattacaaaacaggtgtaacacattctttcaatgatcaactgacgattaccttgcgtgcagatgcgaatacaacaaaagccgtttatcaaatcaataatggaccagagacggcgtttaaggatggagatcaattcacaatcggaaaaggagatccatttggcaaaacatacaccatcatgttaaaaggaacgaacagtgatggtgtaacgaggaccgagaaatacagttttgttaaaagagatccagcgtcggccaaaaccatcggctatcaaaatccgaatcattggagccaggtaaatgcttatatctataaacatgatgggagccgagtaattgaattgaccggatcttggcctggaaaaccaatgactaaaaatgcagacggaatttacacgctgacgctgcctgcggacacggatacaaccaacgcaaaagtgatttttaataatggcagcgcccaagtgcccggtcagaatcagcctggctttgattacgtgctaaatggtttatataatgactcgggcttaagcggttctcttccccattgagggcaaggctagacgggacttaccgaaagaaaccatcaatgatggtttcttttttgttcataaatcagacaaaacttttctcttgcaaaagtttgtgaagtgttgcacaatataaatgtgaaatacttcacaaacaaaaagacatcaaagagaaacataccctggaaggatgattaatgatgaacaaacatgtaaataaagtagctttaatcggagcgggttttgttggaagcagttatgcatttgcgttaattaaccaaggaatcacagatgagcttgtggtcattgatgtaaataaagaaaaagcaatgggcgatgtgatggatttaaaccacggaaaggcgtttgcgccacaaccggtcaaaacatcttacggaacatatgaagactgcaaggatgctgatattgtctgcatttgcgccggagcaaaccaaaaacctggtgagacacgccttgaattagtagaaaagaacttgaagattttcaaaggcatcgttagtgaagtcatggcgagcggatttgacggcattttcttagtcgcgacaaatccggttgatatcctgacttacgcaacatggaaattcagcggcctgccaaaagagcgggtgattggaagcggcacaacacttgattctgcgagattccgtttcatgctgagcgaatactttggcgcagcgcctcaaaacgtacacgcgcatattatcggagagcacggcgacacagagcttcctgtttggagccacgcgaatgtcggcggtgtgccggtcagtgaactcgttgagaaaaacgatgcgtacaaacaagaggagctggaccaaattgtagatgatgtgaaaaacgcagcttaccatatcattgagaaaaaaggcgcgacttattatggggttgcgatgagtcttgctcgcattacaaaagccattcttcataatgaaaacagcatattaactgtcagcacatatttggacgggcaatacggtgcagatgacgtgtacatcggtgtgccggctgtcgtgaatcgcggagggatcgcaggtatcactgagctgaacttaaatgagaaagaaaaagaacagttccttcacagcgccggcgtccttaaaaacattttaaaacctcattttgcagaacaaaaagtcaactaaccgcaactttagagtaaagggctgattgtcaatgtgggagcagttgtatgatccgtttggaaacgagtatgtgagcgcacttgtggcgctcactccgattctcttttttcttttggctttaactgttttgaaaatgaaaggcattcttgcggcatttcttaccctagccgtcagtttcttcgtctccgtttgggcatttcatatgccggttgaaaaagcgatttcttctgttttgttaggaatcgggagcgggctgtggcccattggctacatcgtcctgatggcggtgtggctgtataaaatcgccgtgaaaaccgggaaatttaccattattcggtccagcattgccggcatttcgcctgaccaacgattacagctattattaattggtttttgttttaacgcgtttttagaaggcgcggccggttttggtgttccgattgcgattagtgcggcgctgctcgtcgaacttggttttaaaccgttaaaagcggcggcgctctgcttgattgcaaacgctgcctccggagcctttggggcgattgggattcctgtcatcacaggggcgcagattggtgatttgtctgctcttgagctgtctcggacattaatgtggacactgccgatgatctcatttttaataccattcctgcttgtattcttattagaccgaatgaaaggaatcaaacagacatggcccgctcttctggttgtgagcggtgggtatacagcggttcagacactgacaatggcggtgctcgggccggaattagcaaacattttggcggccttattcagcatgggcgggcttgccctcttcctccgcaaatggcagccgaaagagatttaccgcgaggaaggggccggcgatgctggtgagaaaaaggcataccgtgccgctgacattgcgaaagcgtggtctcctttctacattttaactgcggcgatcaccatctggagccttcctgccttcaaagcgcttttccaagaaggcgggctgttatatcaatcaacgctcctgttcaaaatgccttttctgcatcagcaaattatgaaaatgccgccgattgcgccatctgccatgccgttagatgcagtctttaaagttgatctgctgtcagcgactggtacagcgattttagcggcggtcatcgtgacagggctgttcagcaaaaagttctcctctcgggatgcctttgcttccttgaaggagacgggaaaagagctgtgggtgccgattatgacgatctgcttcgtgatggggtttgccaatctggccaacttcgcagggctcagctcttcaattgggttagcattggcgaaaacaggagacctgttcccgtttgtcagtcctgttctcggctggattggcgtgttcatcaccggttctgttgtcagcaataatgctttgttcggccatttgcaggttgtcacgggagcgcagatcggtgcgggttcagatttgctgttagccgcaaatacggcgggcggtgtcatggcgaaacttgtttctcctcaatctatcgccatcgctgccgcagcggtcggccaaacaggcaaggaatctaaactgtttaaaaggacagtggcgtacagcctgattctgttattgatcatttgtatatggacgtttattcttgcaagattaggagtgtaatagaaaaaagcagtacatgcccagcatgtactgctttttttatgttaatttgctttctttgtcatttcggctgttgttttcactctggcttttcccataaataaaatggtaaccgccgcgaggacaattggaatcaaagcgagcaaaaagacatacgtgatacttgatgacatcgcgtcaataatgcgattcaggatcgcatcaggaatctgggaacgtgttcccgcttggaatatctcctgcgggtcgccaatattttgcgcagcgcctgatcccgctgagcctttcataccgctgaaggcgtcattcagcttgtttgtgaatacgtttgtttgcaccgttccgaaaatggtgacacctaaggtcatgccaaatgatcgcaaaaatgaatttgtagagtttgccgttccccgaaagcgaggttcaagatcattcatcgatgccgccggcagcagggagaagttaaagcctacaccaaagcctgaaatcatcataaagactgtcagccatacccgtgctgtgtcaggcgtcatattggaaagaagcagcatgccgataaagaaagctataacagatatcagcatcaaattgcggaagcttgccttcgtttggaagatcccgccgatcatgcttccgatgactgatccaatcatcatcggcgtcagaatgaagcccgcgcttgtcgccgagctgccgtagaccgcctgaacgaaaatcggaataaataccgctaaaataataaatgttccgccatacaggaaagcgagaatctgtgctgtggcaaacaagcggttcttaaacatccagaaagaaataatcggctcttctgcttttctctccacaataaaaaaggcaatgaagaaaacggcgaatacaataaacagcccgatgatctgaatggagttccaatcgtatgttttgccgccaagctcaagggcgaacatcaggcatacaatggatacgactaaggtaatcgcgccgccccagtctattttctgctttctgtgctccagagattctttgtagtagcgaataatgaaaaacaatgacaatgcgccgatcggcacattgatgtaaaacacccagtgccagctgatcgaatctgtaatgatcgcgcctaagagcggaccaagaacactggataatccaaatacagcaccgaacatgccggacatttttccgcgtttttccggcggaaacaaatcaaagataatggtaaaggcaatcggcaggagcgcgccgcctccgatcccttgaatggcccggaagatgatcagctgattcatcgtctgggcaatcccgcataaagcagaaccgattaagaaaaaaataagtccaaacaggaaaaaacgttttcggccgtacatatcggaaagcttgccgtaaatcggcatgccagccataaccgccaccatataggatgccgtcacccaggcaaatttatcgaagcttccaagatcggctacgatattgcccatcgcggtggcaacaatcgtattgtccattgcagacatcaagatgcccagcaggagaccgaggaccacaaatttggtggaagcctgttttgctgttgttgtgtccatttgttctacctcctcttacttttctatgtaagttctgatatcatgataatagtttgattgttgaatatctcgattatcaagataaactcgattttatagggaggactgtcagttgtcaacaagaaattccagaagtgagttggaaaagactgctgttcagctttttcgaaaactgggcacaagaacggttctgtttcatcaggcagccgctcaagctctcggtctgtttcccaccgatttgaaatcagctgacattttaaatgaagcagggccgatgacggccggagagctggggaaaaaaaccggcctcagcacgggttccgtcacggcgcttgttgaccggctggaaaaagcggggtatgtggctcgtgaaaaggacccgaacgatcgcaggagagtcgtaatcgtccctttgactgcttcgaaaaaacatataaaggatttgttccgtcctctgtctgagtcaacgatggatttgtgccgcgaatatacggaagaggagctggaactcattttcagttttgtaggcaaagctgccgatattatggaggaagagcttgaacgtctgaaacagtaagtgaatttgtgcatagcttggcccgttcccgaataaattgtacaagttacataagagaagggagtacgggccggtgaacatttttttgagctatattgtgctgggactgtccttgtctgcgcctgtggggccagtgaatgcggcgcaaatagacaaaggaattaaaaacggtttttggcatgcatggattttcggtttaggcgccatgacagcggatgggctgtacatgctttttatctatttcgggctgtcgcagttcttgaccgctccatttgtgaaaacgtttttgtggctgttcggcttttttgtcctgacctataccggaattgaaacgctgaaaaacgtcagagaaccgatggatgtgcgaagctcgcgggggaaaccgtcatacaggaaaacattcgcatcgggttttctcatttcattgtcaaacccattgagcatccttttttggcttggaatttacggaagcattcttgcgaaaacagcagaggcctacaatatgaatcagcttctaatctatagctccggcatcatgatcggcattttaatctgggatttctgcatggctatcacagccagtacgttcagaaacctgcttcatgaaaagctattgagaggattgaccggaatcgccggtgtatccctccttgtgtttggcttttactttggttatcagggcatcaaacagttattgggctgattcatgaaggacagtcacctgccgcttccagttttaatatagtatccagatgatactggaggtggatcaatggtgaatgggatttacaccaaaagttttctggaacgtattcaggaagagcttcctgaatggcaaagaatcgcttttgagctgctggcagaaactctgggggacgacgcggatacatttccgtgcattcccggacgccaggcgtttctgactgatcagcttcggattgcttttgccggagatccgcgggaaaaccgcacagcggaggaactggctccgttgcttgcggagtacggcaagatatcgcgggacacgggaaaatacgcatccctcgttgtgttgtttgatacaccggaagatttggcggagcattattcgattgaagcgtatgaagagctgttttggcgctttttaaatagactgagtcatcaagacgaaaaagaatggccggaagacattccggccgatcctgagcattataaatgggagttttgttttgacggcgagccgtatttcattctgtgcgctacaccggggcacgaggcaagaagaagccggagctttcctttttttatggtcacgtttcagccaaggtgggtgtttgatgacctaaatggatcaactgcatttggccgtaacatgagcaggctgatccgatctcgtttagaggcctatgatcaggctccgattcacccgcaattaggctggtacggaggaaaagataatcgtgaatggaagcagtatttcctccgtgatgacgaaaaacaggtatcgaagtgcccgttttcttatttaaagaacatgttcaacaaaatgaaataaatcaaggactggcagggcgatctttatgaccctgctttttttgatagatcatggtaacgatggcgataatcacgagaaaacctatgctgacgaaaaaaccgggccggcttgatttttcaaacaatgtaccggacacagctgcagcaatcagaaccatcgctaaataaatttgcgtttttcccatgccctcgggatcagtcagctttttgctggagaacaggataaacagccaagtgtataaaagcataagccccgcagctgttgtcatatgctcataaatgtttttaggcagcactaacgacaaaataatggagaggacaagccccgcaaacgtcagcccaagtgccggccagcatatttttttgccttcctttagagtaaagcatttcggcgcgtcgccgtcatcagccattgtacaaagcaatgtcgtaaccgcaaatagcgaagcgacaagggtcgagaaccctgcgatgatgaaaatcccgttaaatatatcaaggatgatctcaaggttatatccttttaatgacgtaatgaacggactgtcctgttcagtaaacgtgtgtaacggaaccaaaagcagagcaagcccgattgaaatgatataaataatcgccagcgtcgccagcatcagtttccctgatttagacgcttcctcaggtttttttaagtgaaccgccatcagccccatgacctcaattccgccaaaagcgtaaaacgcgtagattaaacctgtccacagccccatggcgccgtatgggaaaaactcactcgtcttatttggaacatgtatgccatgatttccgccggacaggataccgcataaagccaggatggcaatgacaataaacataaaaatagcagctgttttaatgactgccagcacgttttctgttttttcaaagacggacaggccggtgaaaataataaggagcccaagtactgcgtagattgaggcaaacacccatagcggcacttgaggaaaccaatgcttcgtaaagagcgaaatggctgtcagctggcttccggtaatcagcatttctgatgtccagtacacccagccgttgctgaagcctgcccatttgccgaatgcttttcgggcatacgcacaaaacgagcccttttccggctgcttcgccgatagcttggcgagctgttcaaagacaaaatacgtaccgatccctgcgatcagaaatgaaaggagaacggaaaaaccgctttttacaattgcgatgctggaaccgagaaagaagcctgttccaatcgtgcagccgactccgatcagtgacagctgccaccaagccagattcccttttggctggtctttttttgtttggctcattatttattcaaccccttttatctaaggttagattgtgatctgtccaaagcttatatacatcggatttttgcctctttttacatggagaaggaagcagacgctcatactaatgaaaaaaggagcaaaccaatgacacagcaatatattgtggagccgaaaaaagggcttgggctgaagctgaaaaaggggcagattttaaaggtggttgatgtagaagggcagcaggtggctgattttgtcgcataccatgccaaggatttttatgaacaccttgatcagggagcgacgatagacgccaatcactccattcatgtgaaggtcaacgaccatctctactccaacctgtataagccgatgttaaccctgattgaagatacggtcggcaagcatgatctgctgttgcccgcctgccgtcctgatatgaacaggctcttatatgggaagcaaaaggatgagtttcaggatacgtgctatgacaatatgaaccgtgcgcttgagcagtttggcgtaccgaagccccacatgcattacccatttgcgatttttatgaatactgtccttgatgagaaagggaatctgtctgtggaaacgccgctttcgaatgccggagattatgtaaggctcagggcggagatggatttaattgtcgcgttttcttcctgcccgattgaaaaagggaaatgcaatggcgacagtgtgacatccatacgggttgaagtcagctgatctctcttgttcacagtgaatgaagacctgtgctatatttaatagggatacataacagtcatgattcattttcattgatttagggaaatgatcagtaataagggaaaatgtacaggaggaatgattgggatgagcatgcaggaaaagattatgcgtgagttacatgtgaagccctcaattgatccaaagcaagaaattgaggaccgagtcaattttttaaaacaatatgtaaagaaaaccggtgctaaaggctttgtattgggaatcagcgggggccaggattcaacacttgcgggaagactcgctcagcttgcggtggagagcattcgcgaggagggcggagacgctcaatttatcgcggtccgtcttccgcatggcacacagcaggatgaagacgatgcccagcttgctttgaagtttattaagccggataaatcatggaagtttgatattaaatcgacagtcagcgctttttctgatcagtatcagcaggaaacaggcgatcagctgacggactttaataaaggaaacgtaaaagcaagaacaagaatgatcgcgcaatacgcgatcggcggccaggaaggtcttcttgtgttaggaacagaccatgctgctgaagcagtgactggtttctttacgaagtacggtgacggcggagcagacctcctgccgctgacaggcttgacgaagcgccagggaagaaccttgctgaaagagctgggtgcaccggaacgcttatacttaaaagaaccgactgccgatctgctcgacgaaaaaccgcagcagtcggatgaaacagagcttggcatttcctacgacgagattgacgattatctcgaaggaaaagaagtatcagcgaaagtatcagaagcgctggaaaaacgctacagcatgactgaacataaacgccaggttccggcgtctatgtttgatgactggtggaaataagttgaagaaagcccgctctcggagcgggcttttgtcgtgtacagaagctttatttgatgcggatatgattcagctttaccattaatctgtcggcgaaccttcggaggctgcctcttgtatcaggatctaatgggagttcggctctcgcggcaatgttctctgccacatcctgaatcgacaggttgtctgtttgaatgtggtcctcaaaaatgggtgatgataatccttcaacacagcggtcaatttgtttggcggcccatgagttttttccttctgctctggtgcgcagcctttttaacaaggtttcctttgaagccattagtgtaaagtggtgaacgatcctgccttcctgtctgagcctgccgatgatctcattgaagtattcagggtgtacaatcgtcataggcacaataaggatgccgcggtatgtatctgtcagagaagctagcaaactgtaattgaacgcccgccataaaggatagctttgaaaatcgtcctttgcgatctcctgcggcaccatggagcgcagcgcaaaacccattttctcgggatcatacacgtaagatgggttcagccttctgtgcagttcgaaggctgtttgtgtttttcccgaaccgaatgccccgtttatccaaatgatcatcgccatttctcccttcctatttatcatacagaaaaagacccttccatcgaagagtcagctggaaaaacaataaaggcggaaggttttaacgcttttttgcgtcgaagtattaaaatacctgcagaaatgttgtacaatgaatgtcattcaggcaaaaatggctacaacaaagcgcactataagcttgaccggtaaagccggtatctatataaatattcgctaaataagcatataatgaatatataatttcattccttaggaggatttcgccgaagatgaacgctaaacgagccatcccagtaagagaaagaaatatcgtcctgatcggattcatgggtgtaggaaaaacaacaatcggccaattggtcgctaaaaaattatatagagattttattgatattgaccagcagatcgaaaaggatttcaatatgtcaattcctgagatatttgagaaaaagggagaagactttttccggaaaacggagaaggaatatattttagacatctgccatcataaacgattcaaaatcgtatctctgggcgggggatcttttaaacaagaagaaatcagaaattgctgtctggaaaactgtctcgtgcttcatctggacctgtcatgggagaactggaagcagcgcgcggatttattgatcgaaagccgccctgtactgcataaccgttcaatggatgaaatggaacagctgtttaacgaaagaaaagtcatttatgacaagcacaattcaaaagtggcaacagacaacctttccccggaagaggttgccgattacattgttgagacattaaaaattggctgggatctttatcagccgatgtaaaaagccgtgcgcagcgcacggctttttttatcgttttatcccttgtatcaaaatcgcttttaaacaaaaggagatgggctgtccgttttggttcaatgtaatacagaacgtgtcgcgtgcttcgtctgatgcgtgattcaagtgggtaatgatttgtttttctcggtcagcgggggttccgcctcgtttgatccagctatcgtattgaatcggcaagttccacttttggatgtcttgataggccagttgattggcgctgaacatcgcctgccattctgataatgagctttcacgaacatgggaagggtctcgaagccggttcaaatgattgacaaactcatcaagaacgggatcttcaggcgcgtaatgatcaactaagagaaaacgtccgtcctgttttagtacgcgtgcaacctctctgacagctttgcggacatctgaaaaatggtgggctgcgtatcggcaggtgatgatgtcaaatgaatcgtcggggaaggggagtgactctgccgttccttgctgaaagcgtacgttttcaactcctttttcttgcgcgaaggaggacgcaacctcaaccatctctttcgttgcatcaacaccgatgcactcctgtacataaggagaaaatgccagcgccgtatggccggcgcccgctcctatatccagcactcgatgctctgcccggcattccgctgttttgatcatcaaccccaaatcttccccctcggcaaataccttttcatcccgatacatctcggcgtttttagaaaacggtgtttcatttgtcatttgaaccagctccttcttttcgtaaatgatgatatggattatgttagcaatttctgttatgattcgtccaagatataaaaatgatgaaaatgataggttcaacctatggaggctgaaatggatattaaagtgatggaatatgcagcggaaattgcccggcgccaaagctttacaaaggcggcggaacatcttcatatcgcacagccgtctctcagccagcaaatcaaaaagcttgaggctgagctggggcttaccctttttcacagatcccatggctctgttacactgacacctcacggcaggcgtttcattgaaaaagccgaggacatcattcgttccagagatgatttgcttcgggaaatgcaggagcgatcacagggaatcggtcataaattatccatcgggattcctgctgtaacagggagatatctctttcctccgctgctgaagcagtttttggcgcgctatcctcatgtggaggttcagcttgttgaaaaagatccggtttcattagagaagatgacggcaaagggagaagttgacctttctgttttatccttgcccatcgaggatgaacggctctccattacacccttgctcacggaaccggttgttctcgcggtgccgaaggaaaaacaaaggtggatgccgccggaattggtcgcgctgattgagaaagcgctggaagaagatgagggacgccagccgtgtgtgccgattgacatggtaaggaacgtgccctttattctgttaaaagaaggcttcggctttcgcaggacagttctcgatctctgtgcggaaagcggctttaagccgaatgctgcctttaagacgagccatattgaaaccgcccaatctcttgtggctaacggattaggtgtgacaatggcaccgaatatggtcagaagggataaagatccgggtgtgatctatttatcgattcaatccgcgccatcacgaaccctcgtctttgtctttttaaagaaccgctatgtcagtctgacggcccaggcctttatggaactaagccgggaaagtcttaaacaaacgtttgatgaaggctgtctgggaaacaaagatgaaaatatttagaaaacaaagacgaaacgtggtagtataggaatacaaactaaatcttataaaacaaaggggaataatcggaaatgcaactattcgatctgccgctcgaccaattgcaaacatataagcctgaaaaaacagcaccgaaagatttttctgagttttggaaattgtctttggaggaacttgcaaaagtccaagcagaacctgatttacagccggttgactatcctgctgacggagtaaaagtgtaccgtctcacatataaaagcttcggaaacgcccgcattaccggatggtacgcggtgcctgacaaggaaggcccgcatccggcgatcgtgaaatatcatggctacaatgcaagctatgatggtgagattcatgaaatggtaaactgggcactccatggctacgccacattcggcatgcttgtccgcggccagcagagcagcgaggatacgagtatttcaccgcacggtcacgctttgggctggatgacgaaaggaattcttgataaagatacatactattaccgcggtgtttatttggacgccgtccgcgcgcttgaggtcatcagcagcttcgacgaggttgacgaaacaaggatcggtgtgacaggaggaagccaaggcggaggtttaaccattgccgcagcagcgctgtcagacattccaaaagccgcggttgccgattatccttatttaagcaacttcgaacgggccattgatgtggcgcttgaacagccgtaccttgaaatcaattccttcttcagaagaaatggcagcccggaaacagaagtgcaggcgatgaagacactttcatatttcgatattatgaatctcgctgaccgagtgaaggtgcctgtcctgatgtcaatcggcctgattgacaaggtcacgccgccgtccaccgtgtttgccgcctacaatcatttggaaacaaagaaagagctgaaggtgtaccgctacttcggacatgagtatatccctgcttttcaaactgaaaaacttgctttctttaagcagcatcttaaaggctgataaatgtgaaaagccgccgcatatcatcaggcggtttttttctgcaaactgccggaatgagaacagactggagacgaatagatatgaaacaaagaatcattgatgaattaaaacggatcgagcagtcatacggagtcaaaatcgtgtatgccgtcgagtcaggaagccgcgcatggggatttccctcgcaggatagtgattacgacgtccgctttatttatgttccgaaaaaggagtggtacttttcaattgagcaggagcgtgatgtcattgaggaaccgattcacgatttgctggatatcagcggctgggagctgagaaaaacgcttcggcttttcaaaaagtcaaaccctccgctactcgaatggctgtcctcagacattgtgtattatgaagcatttacgaccgcagagcagttaagaaaactccgcacggaggcatttaagcctgaagcaagcgtgtatcactatatcaatatggcgagaaggaacgtcaaggattatctacaaggacaagaggtcaaaattaaaaagtacttctacgttcttcggcctattttggcctgccaatggattgaaaagcacggaaccataccgccaatggactttactgttttgatgaatgaacttgttgctgaacccgagctgaaggctgaaatggaaaccttgcttgaacggaaaagaagaggggaagagcttgacctcgaagcaagaatcgatgttattcaccaattcattgaaacggaaatcgaaagaatcatggaagcggcaaaagaactgaaggcagagaaaaaagatatgacatctgaattgaaccgtttgcttttgaatacggttgaagaagtgtggaaggatggaggaagctgatgttttttgtcgcttccttttctcctttattcgacagaatccccccccgactttctaactatctgattgtggcaaacccacaaaaataatcagaatctttgtattttgagaatattgtgaacgctggttttgtccatttacaataaactcatacaaatacttcttagattgcggggtgttgaggttggaagtgatcacaagagattttttcttatttttatccaaaagcggctttctcaataaaatggcgaggaactggggaagtcgggtagcagcgggtaaaattatcggcgggaatgactttaacagttcaatcccgaccattcgacagcttaacagccaaggcttgtcagttactgtcgatcatttaggcgagtttgtgaacagcgccgaggtcgcacgggagcgtacggaagagtgcattcaaaccattgcgaccatcgcggatcaggagctgaactcacacgtttctttaaaaatgacgtctttaggtttggatatagatatggatttggtgtatgaaaatatgacaaaaatccttcagacggccgagaaacataaaatcatggtcaccattgacatggaggacgaagtcagatgccagaaaacgcttgatattttcaaagatttcagaaagaaatacgagcatgtgagcacagtgctgcaagcctatctgtaccggacggaaaaagacattgacgatttggattctttaaacccgttccttcgccttgtaaaaggagcttataaagaatcagaaaaagtagctttcccggagaaaagcgatgtcgatgaaaattacaaaaaaatcatccgaaagcagctcttaaacggtcactatacagcgattgccacacatgacgacaaaatgatcgactttacaaagcagcttgccaaggaacatggcattgccaatgacaagtttgaatttcagatgctgtacggcatgcggtcgcaaacccagctcagcctcgtaaaagaaggttataacatgagagtctacctgccatacggcgaggattggtacggctactttatgagacgccttgcagaacgtccgtcaaacattgcatttgctttcaaaggaatgacaaagaagtaaaaaaggagagattatcatgacaacaccttacaaacacgagccattcacaaatttccaagatcaaaacaacgtggaagcgtttaaaaaagcgcttgcgacagtaagcgaatatttaggaaaagactatccgcttgtcattaacggcgagagagtggaaacggaagcgaaaatcgtttcaatcaacccagctgataaagaagaagtcgtcggccgagtgtcaaaagcgtctcaagagcacgctgagcaagcgattcaagcggctgcaaaagcatttgaagagtggagatacacgtctcctgaagagagagcggctgtcctgttccgcgctgctgccaaagtccgcagaagaaaacatgaattctcagctttgcttgtgaaagaagcaggaaagccttggaacgaggcggatgccgatacggctgaagcgattgacttcatggagtattatgcacgccaaatgatcgaactggcaaaaggcaaaccggtcaacagccgtgaaggcgagaaaaaccaatatgtatacacgccgactggagtgacagtcgttatcccgccttggaacttcttgtttgcgatcatggcaggcacaacagtggcgccgatcgttactggaaacacagtggttctgaaacctgcgagtgctacacctgttattgcagcaaaatttgttgaggtgcttgaagagtccggattgccaaaaggcgtagtcaactttgttccgggaagcggagcggaagtaggcgactatcttgttgaccatccgaaaacaagccttatcacatttacgggatcaagagaagttggtacgagaattttcgaacgcgcggcgaaggttcagccgggccagcagcatttaaagcgtgtcatcgctgaaatgggcggtaaagatacggttgttgttgatgaggatgcggacattgaattagcggctcaatcgatctttacttcagcattcggctttgcgggacaaaaatgctctgcaggttcacgtgcagtagttcatgaaaaagtgtatgatcaagtattagagcgtgtcattgaaattacggaatcaaaagtaacagctaaacctgacagtgcagatgtttatatgggacctgtcattgaccaaggttcttatgataaaattatgagctatattgagatcggaaaacaggaagggcgtttagtaagcggcggtactggtgatgattcgaaaggatacttcatcaaaccgacgatcttcgctgaccttgatccgaaagcaagactcatgcaggaagaaattttcggacctgtcgttgcattttgtaaagtgtcagactttgatgaagctttagaagtggcaaacaatactgaatatggtttgacaggcgcggttatcacaaacaaccgcaagcacatcgagcgtgcgaaacaggaattccatgtcggaaacctatacttcaaccgcaactgtacaggtgctatcgtcggctaccatccgtttggcggcttcaaaatgtcgggaacggattcaaaagcaggcgggccggattacttggctctgcatatgcaagcaaaaacaatcagtgaaatgttctaagcgggactaaatgggcatcctccctgcgggggtgtccatttcatccatatactataaaaaagaggaggaagtgccatagaaaacacacagctgattatttcgatttgtatttatatggcgggaatgctgctaatcggctactttgcttacaagcgtacgtcgaatctgacggattatatgctgggaggacgctctttgggtccggcagtaaccgctctcagtgccggcgctgccgatatgagcggctggctgctaatggggcttccgggcgccatgttttctactggtctgagcggcgcttggatcgtcatcggactttgccttggagcgtgggcgaactggctttacgtcgcaccacggctgagaacctatactgaaaaagcggggaattctattacaattcccggattcctggaaaatcgcttcggagatcaaacaaagcttctcagactgttttcgggaattgtcattttagtctttttcacgttttatgtatcgtccggaatggtgtccggcggcgtcttattcaacagcatcttggggatggattatcacaccggcctgtggattgtgacgggtgttgttgtggcatataccctgtttggcggctttttggcagtcagctggacagattttgttcaggggattattatgtttgccgcactcattcttgtgccgatcgttacgtttttccacacgggaggagcaggtgatacagttgctgaaatccgctctgtagatcctgatatgtttaatattttcaaaggaacgagcgtccttggcattatttctttgtttgcctgggggctgggatactttggccagccgcatattattgtgcgttttatggcgataacgtctgtcaaagagatcaaaagagcgcgcagaattgggatgggctggatgattttgtctgcagtaggcgcagtgctgaccggtttgggcggaatcgcttattaccatcagcgcggcatgacactgaaggacccagagacgatttttattcaattagggaatatcttgttccatccgattatcacgggttttctgatttcagcgattttggccgcgattatgagtacaatttcttcccagctgcttgtgacatcaagctctctggtagaagatttgtataagtcgatgttcagacgctcagcttcagataaagaactggtgtttttaggccgactggctgttctggctgtttcaattgtcgcgttggttctggcttgggagaaaaataacaccatccttggattggtcagctacgcgtgggcgggcttcggtgcatcattcgggccagttgtactgctcagtctgttttggaaacgaatgaccaaatggggggcactcgccggcatgattgtgggagcagcgactgtaatcatttgggcgaatgccggtctttcggactttctgtatgaaatgatacctggttttgctgcgagtctattatctgtcttttttgtcagcatattgacgcaggctccgtcacaagctgtcacagaccagttcaacgactaccaagatacaatgtcgcaataaagatcgaaaggaggaggaaggggctgtccctttttcctcttttctccttttaagcggccatttttttcttttggaaacaaacgtatttttttctatacaaaaagaccccgtatggatatgattaaagtaaaaaaagtataggagaaaaaggtatggaagagcttttagagagagttttttcattttcagatgttgataagctaattgattttattagctatgaactgcaaaagccagtgatactggaaagcgcggatttctttttgttagcctataattcttactatattaaccattttgattctgccaaccagcagactattttttcgaaaaagtgtccggtccagatttttgagaggtttctgaaggacggaattattgaaaaattgaaaacagagcctgagccttttcgcgtcaataaaattgaaagcattgggttaaaccagagggtggtcgtgagtgcaaagcacaaaggggaagtcatgggctacatctggattcaggagctggaccaaaatctgacggatgaagagctcgactttttgtacgagacctccttccatgtcgggaaaatcatttataaaacgaataaattgaaacaggaaaaggaagaaaaagcagaggatctcatcaaacgggcgatctatcagcaatttacctctgagaaggaactcagacgggaagctgaaaggatcaacaccgtgctgccttccatgttttcagttgttatcctgcacgccgcaaatggggatggggaagcggttgaggatttaaaggaaaatatcaggtcgtacctgaatttacgggataaggtcagtcatgtcttaacgatcgaatcaaacattgtcatcgtcgtagcgagtttttcccaaaaaagctccgtctcctcagcagcttctgagtttattaacaagctgttaacacattttcactttcaaaaaatacctacccctatttatatcggtatcggaaacgaatataatcacctattaaaacttggcaagagctacacagaagcacttgaagtcatcaaagccgcagaaatcaccggcaatcaggaaaacattccatatgaatatgccaaactcggcatttaccgctatttagaaagcatcgaacagaaaaatgaatttttagaatacgagaataaagatttagctttattaaaagcaaaagacgaagaaagcagcactgagctgctcaaaaccttggaaatctatctcctcaacaactgcaaaacaaaaccagcggcagaacagctgtttattcaccaaaatacattgaattaccgcatcaaacagattactgagatgacgtcgatcgatttaagcgatttcagaacgcggtgccagctctatctcgatttgatgctgatgaaaaagaaataaaaaagaaaccagtacttgtactggtttcgtcttcacttaaaatcctctgtaaacatacggatcatcaggttttttaatggtattccagtcagttactttgacgacagggagagttgacttgaatggctggtaatattctgaggccagagtgcccttaatgtgaatccattcatcatccttgatgtccatgtccttcggaaattccacaagcatcccgtacacgccggaatcagcgatacagtgaatgatgccaaaccttaatacgaacagctgatttttgttaattgcgtttcctttgtaagcaaatccatgaaattctatcgtccgtccgagaaattcacccggatagttatagatggtttccattccttttaggaaatcgtcatcggtcagagaaatctcttttttgctggaatacttattaaacagctgtttcatttgtttgtcatagctgtcttgcgcgtaataaaggctggcatcaggccgcaaatactgtgtttgggagtagtgatctccgctctccatcgccttaaacgagaacccttttgttttgactatggatgagtcaagcgttgcaatcgggaagaagatgcctgacaccaaaggaaaaagaaaaacaacataaatcaaataacgctgataaaatggcttgttttgttcatggtcatgctcgtgatcatggccgcacccgcaatcatggtcatggtgatgtccgcttttttcaggcgacttgataaatagatatgcttggacggcggtcagaatggccagcaggaagatcgcaataaaggaaagataggcatatttcatattgatatattttgttagatttcctgaggcatgcagatgataaaagaaaaacgtaaatcccatcagcaccaataaacgaaacatccaatcacccctttaccagtagtgatcccgctaaaacaatcacgacaatgtatgtaatcagcaggaaaacaaatcgttttttgaaggccgcaagcatcatcaatagattcttaatatccaccattgcaccaaagacgagaaaggcgattaacgatcctaatgaaaacgtgctgctgaaggaagacgcgatgaacgcatcaacttctgaacaaagcgacaggacaaacgccagacccatcatcacgagggaagaggatacatcattctgcccgatcgcaagcagagtggatgttttgacatacgtctgcatagcggctgcgataaaggcgccgatgattaaatatttccccacggagaaaaattcatcaatggcatgccgcaaggtcccgcccagtttttggagcaaggtgccgtgatgatgatggtggtgcccgggttcatcaggctttaaaagctggttatccttaaattgataggataagatgaccccgatgatcagcgaaacggcgagagccagtccgcctctgtaaaagaccacgctccatctattcccgaacgcaatataagtagaaaataaaacgataggattaatgataggcgcggtcagcatgaaagcaacgcccgcatgcagaggaactccctttaacagaagccgcctcgtaatcgggatgatgccgcattcgcaggcgggaaataaaacgccggccagcgcaccgaataaaacggcgagaaaacggtttttcggcatgattcttgcaatcatttcttcagaaacaaacatttgaatgattccggaaagtatgacgccaatcagaataaacggaatggcttctattaaaatgctgataaaaatagaattcagctgaagaaaagatgattgtgctgtcacaataaaacctccgctcatgttaagctgcctttcttatgataccagaaaaaaaggcactgcttgtttgacggaggaggggaaaggatcgtttcactttggttaggattccaaaaagccgagtaggatactgcctgtttctgcagcttcttttccgagccaaatcaggtgtccccatgagtgaagcaaacagagaacagcgccacgaatgtgctcttttgcatgatgtgcatgtgacaagtcaaccaatccgtcataaacactttgcataatcagcacgggacatatgatggcttgcaggtcttttaaagagacagcggcggtttgtgacaagtcaatcagaaatccttcacccgagcgctgccggctgttcattttccgaaatgcttctatgtctttttcattcatcaaggacttgattcgctgaaacggaagcgtgctgaattgggggctcatagctcgaaacatcaaacgcgggaaagcgttattcaaggaagaaatcagcttccatatccacttttccaccggcgggcggaagagaatttcccccaatttatattcagtgtcttttggggtgagccactctttggtgactgcggattgcagggtcaatgtatttactctttccggataatgtgaggcaaagcatatgccgctcggccctcctgctgagatggcgatcacatggacactctcgatttgtagatgatctaataatttcacatagaaacggcaggcattggcaagactttttccaatttcttttgacgtccgtccatagccaggccttgaaggcgtaatgatggaatacccttgttcaatcaacgctgtgtatccgaattcctcgtaacaatttgaatgcccgccatgcatgacaaggatcggagttcccttgcctgtcacagaatattctagtgtaccgccatcgaaggtgatcgtttcaactcgtcttttcatctgtttcacccaattggtttttgcctattatagagttttcagcaattgaccacaaggtagaagaaatgaataaacaaaggcccttgaaatatgatatactttgtattgatattcattctcaattaaaactttgatatagatgtgaacgggaggcaggacggatggctgagaatcaagaggtatatgacgttacgattataggcggggggccgatcgggctgtttactgctttttactgcgggatgcgggagctgaaaacaaaggtaatcgaatttttgccgaagctcggagggaaggtgtctttattctttcctgagaaaatcattcgcgatatcggcggcataccggggattgcgggaaagcagctgatcgagcagctgaaggagcaggcggcaacgtttgatcctgatatcgtattgaatcagcgtgtgaccgggtttgaacgcctagatgacggcaccattgttctgacgggttctgaagggaaaaagcactatacaagaactgtgattttggcttgcggcatgggtacacttgaggtcaatgagtttgacagcgaggatgcggcccgatatgcgggcaaaaatcttcattatggagtggagaagctcgatgcgtttaaagggaaacgcgtggtgatatcaggcggcggagatactgcggtcgattgggctaatgagcttgaaccgattgcggcgtctgtgactgtcgttcatcggcgtgaggaattcggcggaatggaaagcagcgtgacgaaaatgaagcaatcatcggtgcgggtgcttacgccttatcggctggagcagttgaacggagatgaagagggcatcaaaagcgtgaccgtttgtcatactgagtctggccagaggaaagacatagaaattgatgagctgatcattaatcatgggttcaaaattgatctcgggccgatgatggagtgggggctggagattgaagaaggaagggtgaaagctgacagacatatgcgaacgaatcttccgggcgtgtttgtggcgggcgacgcggctttttatgaaagcaagctgagattgattgccggcggatttacggaaggcccgacagcggtcaacagtgccaaggcttatctggaccctaaggccgagaatatggcgatgtattccacccatcataaaaaattggtgcataaataaaacagcccttgaggaaaagggctgcttgccatcaggtgtgaaggagttttttctctgcatgttgattgtggatgaaagctagcaattcatcctgttcttgtacggctgtgaatccataaatgccggcagctgagtcatcgcctatgcagacgataggagggcggcttgctgacggttccggcaaaatgccaatttgttcgccaccattgatcaattgctgaacggacagcttgtttgggcaaatgaccatgtgcagcggggattcactgatggtacgctgaatcatgtgggtgaaccggtcatctatgacgttttcatgagtgatataaaacgaacaggattcatgcttttgcatgttttccactgcatggcggctcccgacaacaagacgtttctctgaatcaggctgaatggcggtgacaagaaagccccgtttctcaagctctgtctttgcttgctcagatgctgcactcagtttggctgtcagctggcggatgtcgattttctgagaagccagtgctctgaaaaattcacaaaccgcccggcgcgatgtgaaaaaaacgtcttcaaaggtgccaatctttcgaagaatttcttcattgacaggcatgttttcggtccgccatttcggccactcgatgagatcggcgccggaatcgcgcagcttgtctgcaagcgggtcttcatcttcgccatgagtcacaaccatcaaatgccgtccgatgagcggtttgctttcaaaccagctgtgtgtttgaaagttgacgatgtctccgatgacgataatcgcagggtttgtaatctggtgttcctgcactttttgctgaatgttctcaagtgttcctttcacactccgctggcggccccacgttccccattggatgacaatgacagggacagaaggcgatttcccgtatgaaataagctgctggcaaatataagacaagttcttgacacccatgtaaaaaacaagggtttgaacgcttcgggccagcccttcccagtcaaggttcggcgtgccttttaatgatttatcatgcgctgtaatcatggcaaaagacgatgcaaaatcccgatgcgtgacggggatgcccgcatatagcggcgctgcaattccagaggtgattcccggcaccatttcatagcgaatgccgtgctcatgaagagcatctgcttcctcgccgactctgccgaatacgctcggatctccgcccttcaagcgaacgacggttaacccatttaatgctttttcaaccagcagggcgttaatttctttttgtttcataaaatggcggtttggcagttttccgcaataaataaactggcagtccggtgatgcaaattcgagcagcttcgggttggcgagccggtcatataaaatcacatctgcttccttgagcgcctgttttcctttgatggtgagcaggcctgggtcgccgggtccggctcccacgaaatatacgattccgttcttcatgatcatgtcatccttccgtcactgtaaaaaatgaaggaccactagaaaagtgatccggtcttttgatcaatatacgagataaacatgttctccttcgatcagcgtttcatatgttttgacgcatccgtggtcaggttcttggacgattccgtcttctaaggaaattttccagtcgtgcatcgggcagaaaacatattgaccgctgacgatgccttctgccaggacgccgcccttatgcggacagcggttttcaatggcgcggatgcttccgtctgaaagcttgaaaaccgcgagctccttatcttcaatatacactgttttgcctaattgttcaggcaattcttcaatttttccgatacatacttttgttacgtctttgtttaccatgtccattcctcctcaatgatagtttttgtcattatgatgtggtcacgacattttcaaataattctttagaggtttgtttatcctctaaaaagtctttccacggatccttgtggacagagagtgtttcattcattcggccgttcagctcctgccgcttttccggatcgtttaacacggattggacatgggataaaccgacgcgctcaagccatgcggacgtacgctccagatagtttgcggtttccctgtaatattgcaggtaagcgcccgcgtattctaagacttcttcatttgttttcaccttcatcagcaaatcgccggcacgcaaatgggttccgccgtttccgccgacataaagctcccagcctccgtcgatgccgacaacgccaaggtccttaatgccggattccgcacagtttcgcgggcaggcagacacggccattttgactttgtgaggcgtgttcagcccttcgaattttttctcaagcgcaatgcccagtgccatggagtcttgtgtgccgaagcggcagaattgctcgcctacacatgttttcactgtgcggagcgtttttccgtacgcgtagcccgatggcatatcaagatcttcccataccttcggaaggtcttcttttttcacgccgataagatcaattcgctggccgcctgtcattttcacgagcgggatctcatatttgtcaacgacatcggcgatcttgcgcaaatctgtggagttggtcacgccgccgtacatccgaggaacgactgagtatgttccgtctttttgaatattggcgtgcattcgttcattaacaaagcgggatgtccggtcatcctcgtatttggttggattgatcatgcctaagtagtagttcagagcgggtcggcatttagaacagccttctggcgttttccagccgagcacattcatgacttctcttgtatgtgacagccctttggctttgatttcttctacgacttcatctctcgacaatgtggtgcagccgcaaatggcttctttttgcgctgacgcatcaaagtctgatccgagcgtatgctggaggatttcttctacgagcggcttacagcctccgcatgagcgggatgcgccggtgcatgctttgatttcgtccgttgacgagcagcccttttcctgtatggcttgaataatcgcaccttttgacacgccgttacagccgcagatgatttcatcgtcgctcatcgctgcggttatgcttgtgcctgcttcctggctgaggggctgtaagattgatattttagaggtttcagagatatcggcttctttttgaatcatagaaaacaggcgattgccttcgctgctgtcgccgaataaaacagcaccgacaatttgattgcctctcaggacaatttttttatagatgccgtcctgctcatcgaagactttaatcgcttttttctcctctgattcgttaaagtcaccggcagagaagacctcgacgcctgatacctttaactgtgtggagagaacggagccctcatacggttttgtttcgatgccgcacatatgctttgccagcacttttgcctgttcatacagcggcgccacaagcccgtaggcgattcctcggtgctcggcacattcgccgaccgcgtaaatgtgcgggatttcagtctgcatataatcgttgacgatgatgccgcggttaaccggaatgccgctctcggccccgagcgttgtatttgggcggatgccgacagccatgacgactaaatcagcttcaatgcttgtgccatccttgaatcggaggccttcgacacggtcgtcaccgacaatttcttctgtttgcttttcaagtaaaaaggtcataccttgtttttctaactcgttttgcagcaggcgtcctgccgttgcatcaagctggcgctccatcaggaatggggcaaggtggatgacggacacgtccatgccgagattcagcagtccgcgagctgcttccaaaccaagtagtcctccgccgatgacggcagcttttttatattgttttgacgcggcgagcattgtgtctgtatcttttatgtcccggaaagctgtgacgccttttttgtctgcgcccggaatcggaaggataaaagggaccgatcctgtcgccaggatcaattcatcgtaaggctggattctgtctgcatctgtgatgactgttttgttttccgtgtccactttgatgactgtttcatttgtatacaattgaatgttgttttcttcgtaccagtcccaatcgtttaacgtaatatctttaatatctgtatcgccttgaagcacttttgacaaaaggattcggttgtaattgggatgcggttcggcaccgaaaattgtgatctgaaactcgtctttagcaacactcagtatctcttcaatggcccttaccccggccattccattaccaacaagaactagctgtttttttcccatcagatgatccgctccttatcaaatgttttttccagcgtagcacagcaaaaaggaatatttaagatacatgttataaaatgtaacaaaatatacgaaaagttctaaaaattttatgaaaaatttaaataggtatgattcggacggcgcataccttaaaaccgggcattttacaggctggatctaaggcttccccgattaaatcattcacattttgagcgtctgcccaatggatgggaacaaaaacggtatcttttctgatttgttctgataatttgctgcggacggtgatgcttccccgcggcgattctatttttaccagtacacggtcctcgatattgtaggtcgctgctgtttgcggatggatctccataaacgattcaaaatgtctcgcggcaagggcggcgctttttcttgtttggacgcctgttaagtagtgagacatgactctgcctgtcgttaaataaagcggataatcggctgtcggcttctcttttggaacaggtggttcgtttggaatcacacttaatgccgctttttgatccggatgagcaaatgattctgtaaacaagcgcccagttccgggatgatcagattccggacacggccaatgaatgccgccttcacgtctgagcctgccgtatgagatgcctgaataatcggcaatcccgcctcggctcgcttctctcaattcattgaaaatatcctccgctgacgtataagaaaagtagcggcccttgccgagagcggatgcgagatcacaaatgatctgccaatcatgctttgcttcgccggggcatggccggcttgcttctcttaatgtcacgcgtccttctacatttgtcatggtgccttcatcttctaagtaagaggaggcaggtaaaatcacatctgcgtatttcgcagtctcagaaataaacaaatcgattgcgacaaagaatgtcagtcttcttaaagcctttttcacgagatttgcatttggactggaaacagcagggttggagcacatgaggaacagtcctttgatgtcgccgtcattgattttttccatcatttcataggctgagacaccttttcgcgggagttcatcctgatggattccccacactttcgcaatatgcgcccggtgttcttcgttttcgatagaacggtagcctggaagctgatcggctttttggccatgctctctggcgccttgcccgttgccttgtccggtgatcgccccgtagcccgagtaaggtttgccgatttttcctgtgatcagcaccatgtttaagaagcctttcacagccgctgttccatcggtttgctgttcaatcccgcgggctgtaaacagcatgccggacgtttccttggcaaacttcacagcagcttttcttatatccaccagcgagacactcgtctgttcggcgatgtcattcaggtccaacgagtcagtatgctgcttcagctcttcgaatccatttgttcgtgattgaatgaaatcctcgtttataagctgttcgtcaatgatgattttgacgagaccgttggcaagggcggcgtctgtgccgggtttgattttcagatgaagatcggcgattttcgttgtcgctgtttcacgaggatcaatggcaatgaagtaagctccgttttctttcgctttttcaaaatacggcataatcgtaggctggcattccgcaatattggtgccggccagaatgatcacacgggtgtgggggatgtctgataaaggattcgttaagcctctgtccgcgccgaatgtttggttggctgcggtggctgctgcggacatacaaagtctcccgttgtagtcgatgtattttgtctgtaagcctactcgtgcgaacttccctaacaaatacgcctcttcatttgtaatcgaggcgcttccgtataccgccatggcgtcatgtccgtgttcagtttggatcattgtcacttggtctttgatatgattcagtgcttcttcccaggaaacaggcataaactcgccgtttttcttcagcagcggccgggtgatgcgggaggagttcaaggcatgctggtgagcattcatgcccttgatgcatagccgaccctgtgtcgtaggattatcaatcccgatcgcagtgtactttttgcgcgtgacgatggtttgttccacgagctgcattttgcactgcatgctgcaaaacgggcattgagtgtcatatgttttttctgattggacgtcttgctgtttatcacggaaatatctaagcagtcgttcagtcaaaatgcctcatcctttcttatatgcgcccgtctctacagtcgggttttgaatcagtgacagatctgtttggaggctttccagcagctgtgcccttaggtcttcttcgaatagcacttctctgatatgaacgatcccgagacggtctatccactgatgaacaccttctaagtaatgagccgtttcccgataatactggatcagtcctttgatcatgccggcagtgctgtcttcgttctcagtcacgcaaaacaaagctcctgaacgggcatgagttccccggacgccgccgatgtgaatgtcccagccagcttgtgtccgaattgcgccgacatcttgcagggcggcctcggtgcagtctgtttcacatgataagctgatagaaatgggagcgggtaagggaagcatctcaagttgtctttcgatttgggctgccagctgctgaatcgatcgattttgcccgcatgtacatgctttgatgctttgcagcgcgtgtcggtgttcattagtgtaaacgggcattttcaggtcttttttcatgttcgggagatccgcaggcttgatcccggaaagcttcagcctttggccgtgagtgatggatacgtcgggaatgctgtatgcctcaatgatgttggcgatggttcttagctgctccgcgtttgtccgcccgccgtacatttgcggaatcaggatgcatgtctcttcagtggctggctcaggctggacaaacccagggtacagcatttccagatagtattgaatcgcaggaacacaagtactgcatccgttttttgttttccagtcaagctggttcatcacttctgccggattagtgaatggcctgcgctgaagctcagcgatgatgtcgtcttctgtaaaatcagtacagctgcaaaacgaaggtgtgctggcgggcttcgtatattcgctgttggtcatgtatctcaaaaggtcttcaacgagcggtttgcatcctccgcaggacccagtggctttggtgcagtgcttgacttcctcaacagttgttaagctattcgtgtgcaccgcgtcttcaatcgcgcctttcgtcactgtgttgcattggcaaatcgtttcactggaaggcatggattcaaataaagggccgcttgtctccggttcgatgatctgttttttggcaatggagatgtctcgttgtttaagcaggctgtcgagaagccgctgcttgtcacgggtgtctccgaataaaataacgccggccagtttgtcatctacaaaaagcgcttttttataaacgcctgcttgttcgtcgtagattttgatgctcgtcgtgcgttcatcctcttggatctttcctgctgaccacacatcgattccagctatttttaacgccgcagatggtgctgagccttgatattcctcacatggaacgccgcaaatatgactggcgagcgcttttccctgctcataaagcggagccaccaatccgtacaccgttccgttatgctcagcgcattcaccaacggcgtagatattcggttcgcttgtctgcatgaagtcattcacgatgatcccgcggttcactttgattccagcggatacagccaattcaatattcggtttgacgccggccgccatcacaatcaagtctgcttttaatgaagagccatctttaaaatggattcggtctgccttcgtggcgccggaaatggagacggtgtctttctccaaaagaaaggttaggcctttttgttccagctctgtttgcagcagccgcgccgctgtttgatcgagctgtttttgcataatgccggcggagtggtgaatgacgctgacatccataccgagatgctgtaaacctactgcagcttccagtcctaataagccggctccgattaccgcagccttttgaaagtgctgggccatgttcatcagcgcttggcagtcttctattgtccgaaatccatagacaccttttttgtctgccccggggatagggagaatatgaggggaggagcctgttgccactattaatttgtcatacgacagagtgcgtttccgatctgtgatgacctgctgctgatctgtatcaatctgaataaccgtttcgcctgtgtaaagcgtgatcccgtgcttgtcgtaccaatccttgctgttcagtgtaatatcatcgagtgacgcttcaccctgcaatacagaggataagagaatgcgattgtaattgggatgcggctcgcttccgaaaatgacaatctcaaacatgtggcgattcagctttaatacttcttcaatacagcggattccggccatgccgtttcccgctaacactaatctttgtttcttcatgtatcagacctcctttggcgaagctcgtaagttttctcctattaaaaattatgtcacaatgcattgttaacgcattaaacgtgtcacaaaaacttacacatgtcttttccagaaaataatggtcctatatccttgattcagaaaatgtaaaataatgagggtctagaaaggggaatcttatgaagctgtcggaactgaaaactagcggtcatccactcactttgctctgttcctttttatactttgatgtcagttttatgatatgggttatgcttggggcgctgggtgtttatatttctcaggattttggcctgtctccttttgagaaagggcttgtcgtagctgtgccgattttatctggatctgtgtttcgtatcattcttggtattttaacggacagaatcggaccgaaaaaaacggcagtgatcgggatgctggtgacgatgattccgctgctttgggggacattcggcggccgttccctgactgagctgtatgccatcgggattctgcttggcgtggcgggagcaagctttgctgtagcgctgcctatggccagccgctggtatccgcctcatttgcagggacttgcgatggggattgccggagcggggaacagcggcacgttgtttgcaaccctgtttggccctcgtctggcagagcagttcggctggcacattgtcatgggaattgcgctaattccattattgatcgtctttattctttttgtatccatggcaaaggattcccctgcacagccgtctccccagccgctcaaaagctatctgcatgtgtttgggcaaaaggaaacatggtttttctgcctgctgtacagcgtcacatttggcggatttgtcgggctctcaagctttttatctattttctttgttgatcaataccagctgtcaaaaattcacgcaggggacttcgttacattatgtgtggcggcggggagctttttccggcctgtcgggggcttgatttcagatcgtgtcggcggcacgaaagttctttctgtattgtttgtcatcgtggcactgtgtatggccggagtcagtagcctgccatctctctcaatggttattgttctattgtttgtcggaatgatggggctcggaatgggaaacggcgcagtattccagctcgtgccgcagcgcttccgcaaagaaatcggcatggtgacgggaatcgtcggtgcggccggaggaatcggagggtttttcttgccgaacatcttaggatctctcaaacagatgacaggcacatatgctatcggttttatcacgttttcctgtatcgcgctgctggcgtttgcacttgtgcttgccgcaggctattactggcggaaaagctggagcgcggaaagcagcccggcggatgtttaggattttgacggacacgcgtttgtgcgtgtcttttttattttctcttgattttcaacagtgaaccgatcaaaataaatagtaattattacgatttgttagtgagaggagttttctgaatgaatcaacatacgctgctcccgaaaaaaacggagcgtcttcaatactttggatcggtcagtccgatcaaaggcgagaaaccagtggaaaaagagaaaatgaaggacctgcaaaatatcaggaaggattatttttttgacattcagcatgtaggtgtagctaatgtgtcccatccagtcacaatcacttctgccatgatgcctgccgagcaaacaacggctgcgaactttacaatgacttgtaatttgccgagaaatcagaaggggattaacatgagccggttaacagagctgctgcaagtctatcatcaaaatggctggattctctcattttcctctcttcagcaatttacgaaagagcttgcagaaaacatggacacatcatctgccacagttgaagtgaggtttccgtggtttttcgaacggaaaagcccgaagcttgagaaagcgggtttgatgcatgctgatatattcatgtctgtcacctatcgcaaagatcagccgtttaaacagcgtgccggcatctcagcaaaagtaacgactctgtgcccttgctccaaggaaatcagcgaatacagtgcccataatcagaggggaacggtcagcatttgggcggatattcacccggccgcatcgctgccaagtgatgttaaagctgatttgcttcacgccgcagaatcaaatgcttctgcgagactgcatccggtattgaagcggcctgatgaaaaagccgtgacagaaacggcctatgaaaacccgagatttgttgaggatctcgcccggctgattgctgcagatttgtttgagcttgaatgggtgtcagcctttgagattgaatgccgaaatgaagaatcgatccatcttcacgatgcctatgcgaagctgtgtttttcgaaggaagtggataaaatatgaaactctcattattcattattgcagttcttatgccagtcatcctgctgtcagcctgctccgatcatgcagaagaacacgcaagtatcaatacaaagaaaacggtcgaaaacataacggacgttcgaaaaacagcaaaaacaagcattgattggacaaagccttcgggcggagaatacccggatattaaacagaagcatgtctggattgatgtgaatgtgaaggagcagaaggcttacatcaaggaaggaagcaacaccatctatacaatgatgatttcttctggtcttgatcaaacaaaagatgatgctacgccaaagggcaccttttatgtagagcctgaacggggagaatggtttttctccgaaggataccaggaaggcgcagaatactgggtatcatggaaaaatcacggtgaatttttatttcatagtgtgccaatgactaaggatcaaaaagtcatcaaaacggaagcagaaaaactaggaacgaaagcatctcacggatgtatcaggctgaccattccagatgcgaaatgggtatatgaaaatatccctgaacatacaaaagtggtgatcagctgaattgaaaaccgttgacaaaaaggaaaaaagaccatacaatttaaatcgtaacaattacgttttatgataaatggcttatcattgtctgtgcatctgtgaaaagcggaaaggcatcgattaaggatcttgctgtcggcaaaggcaaggatttgcgatggggaaaaggattaaacgcggttggagtctttactgatttagaaatcgggcggcagcgagaaatgagcgcgaaaagctgctctacaccattgtacatacggcgaagtattcaatttaaatcgtaatcattctattttaatggaggcactattatgaaaaaaattccggttaccgtactgagcggttatctcggtgcgggaaaaacaacattgctgaacagcattttgcaaaatcgcgaaggcttgaaaatagcggttatcgtaaacgatatgagcgaggtgaacattgacgcgggcttggttaagcaggaaggtggcctttccagaacagatgaaaagcttgtggaaatgtcaaatggctgcatttgctgcacgcttcgcgaagacttattaattgaagttgagaagctggcaaaagacggacggtttgattatatcgtcatcgaatcgacaggaatcagcgaaccgatcccggtggcccagactttctcttatatcgatgaagagatgggaatcgatcttacaaaattctgtcagctggatacgatggtgacggttgttgatgccaaccgtttttggcatgattatcagtcaggcgaaagccttctggaccgcaaagaagcattgggggaaaaggatgaaagagaaatcgccgacctcttgatcgatcaaattgagttttgcgatgtactgatcttaaataaatgtgatttggtcagcgagcaagagctcgaacagcttgaaaacgttcttcgtaaactgcagccaagagccaggttcattcgttccgtcaaaggaaatgtaaaaccgcaggagattttgcatacagggttatttaacttcgaggaagcgagcggatcggccggctggattcaagagctgacggcaggccatgcggaacacaccccggaaacagaagaatacggtatctcttcatttgtatataagagacgtttgccgtttcattctacacgattttaccgttggttggatcaaatgccaaagaacgtggtacgtgccaaaggaatcgtctggtgcgcatctcataacaacctcgctttgctgatgtcgcaagcaggtccgtcggttacgattgagcctgtatcttattgggtggcggcgttgccgaagcttgagcaggagcaagtcaaacagcaggagccggaaatcctggaggagtgggacccggagttcggcgaccgcctaacgcagctagtttttatcggaactgacctggatgaagaaacgatcacgaaagagcttgatcaatgcctgttgactgagtatgaatttgattccgactggtcgctgtttgaggacccgtttaaatggaagctgaatcaatagaaaaaaagccgtcccatggggaacggctttttttaatgaaacgtttgtttaaacataatgagcgtattttttctcaaggatattctgaaagaccgcggcaatggagcagatggcccaataaatgagagcggtcagaatatacatggtcatataatcaaactctctgcccccgatgattttcgcatgctggagcaattccggcactgtaatcatcgcagcgagagaggacgccttgatcaagtcgagcaatacattggcaagcggaggcagcgcaatacgtatcgattgcggcaaaatgatgcccctcatcgtctgccaataggaaagacccagcgaggatgcggcttcccactgtcctttttcgacggatgaaatggctgaacggttaatttccgcaatgtaggcggcgctgtttaggctaaagccgattaaagcagccgtgacagcggaaaattcaatgccgatataaggaaacccgaaataaaggataaacaaaatcaccaaaatcggaacgcctcgcataaatgagatatagagcttcgccggccatcttaacaaagcaagtttagacattctggcgagtgatatgaacaggccgatcacagttcccgcaaacatgcttacaaaagagatgagcagtgtataaccaatgccttttatgacataagggaacgattcaatggccagcttcgtgttgaaaatatattcccactgaatgctattgatcatggcgtccgattacaaatcaacgtcctgaacgtcggcatcaattttttttgatacatctgctttattgaagaattgtttcgacagtttagtcaaagagccatccttgctcatctctttcaatgcttcgttcatctttttctgaagtgccgcattgctttttttcatgacaagggcctgtttgttcggcatgtacttgatgtcaggatgaattgtaatgttgagatccgggaatgccgcgagcgcaagtgtctgcaggtaatagtcgtttaaaatgacgtcagtgcgtccgttggcaacatcttttaaatattgctcattcgtcgcattatcataaatcacttctttggcgccgtattttctcgcgacctccatgtagacggttgtagccgcgccagccgctttcttcccttttaaatccttgagcgttttaatccctgataaatcgtcttttcggacaattgccgtgccgtatgaatatttatatggagtggaaaatgcgaacttctcctcacggtccttcgtcacatcgatgtcattcgcggctgcgtcaacctgtccgctgttcaccgctgtcagcatcccgtcaatgcccatctccttgaactcaaccttcagccccaagcgttttgccgcttcacgaacaacttcaacctcgtagcccgtcagcttatcagagccagagtcagtatcgtgataagaagtgggatagagcgtacctgatgtagcgactacgattttccctttatccttaatctgctcccagcctgtatccttggaatcggcttcatttttgccggaacaggctgccaatataagaaagaaagccattgtgaaactgaatataacggctttggaatgcatgaatgatttcacctatagttcccccaatctgttaatcaactaaaaagatagcattgaacataaggggttgcaatatgttgatcgcgttttcaaaaagttcgaattgtgtatacaaaaagcatgggtgggtgtttaaaagcgtctatgaagggaagaggtgatgaaaaaaggaattgtccaaggatgaatgccagacgtaccaaggaaacgcatgtgaaagtgaaggatgcagcagacccgtcactcatctatgccaataccggaagaaatggtcaagaggcatgaaaccgatcttcagaataaatttaagtcttgctgatgcccctaaggcatatgatatattcgatgagaaagaaaatggaaacatttaaaccataatggggagtcaaatgaatatttacaaaccagccggattttggatcagacttggagctgcattgttagactacattatagtctccgtgccgcttttgctgatctattggctgattacaggaaaagacccaaacgacagcatgttcatcagtttggttgttctgctgtattctattttgctgccgatgttttggcgcggttatcttatcggaaaaaggatctgcggaatcagaatcgtaaaaaaagacggatcacaggtcagtctgttaacaatgtttttacgggttattgtagccggcctggtttactgtataaccttcggactcggcttgatcgccagcctgattctgattgccgtacgagaagacaaacggaccctgcatgatttaatcgcgggaacatatgtcacttatgcgacaccaggtgaagaggaacttaatgctgacgaagagattagaaagagcgaataatggttcgctctttttatttttatgcataaaaaatacaaggcagcaaaacatatgaaaaataggattggaggaataaaatggatgaaacgaataaccatcaacattatcacaatgttcattgcagcggctgtcatttctctgaccggtacagctgaggccgctgaaaaacagcagcagtctcccgcaaatgttacactgacagatcagcaaaagaaagagattgaacaactggaagcagagattcttaaaaagcgcaaagacgtgatctcaaagtatgtacaatacggtatcctgcctaaagaaagaggagaacacatcaaaaatcacttggacaaacactttgaaatgatgaaacaaaacggctttgttccaaagcaccatcctcatccgcataaatttgaaaaaagacattaagattttaagcatccaatgggaattgggtgcttttgcgttatttacaggtaggcaatattagctgagctgttccgcgactaacatcgagttgatatgaaacgcgtttcatagcctatgataggtttatcaaataattcaggagtgataaacactatgatccaccagcatccagaatcttttccgaaacattttttgtggggctctgcttctgcagcgtaccagattgaaggcgcttggaatgaagatggcaaaggcccttctgtttgggatgtgtttacgaaaataccgggcaaaacgtttaaaggaaccaatggcgagattgcggttgaccattatcaccgatttaaagaagatgtcgctctgatggctgagatggggttaaaagcatatcgattttccgtcagctggccacgggtttttccaaaaggaaaaggagagatcaatgaagcaggtctagcgttttacgatagtctgattgatgaattgctttctcatcacatcgagccggttctgactttatatcactgggatttgcctcaagcgcttatggacgaatacggcgggtttgaatccagaaacatcatagaggattttaatcactactgtattactctttataaacgttttggagacagggtgaaatattgggttacgttaaacgaacagaactacaattttaatcacggatttattacagccatgcatccgcctggagtgaaagacagaaaacgattttacgaagcaaaccatattgcgtttctggctaatgcaaaagccatcgaatcatttagagaatatgtgcctgaaggcaaaataggtcctagctttgcttattctccggcttaccctttatcaagtcatccagaggatatactggcatttgaaaacgccgaagaatttacgaacaattggtggcttgacatgtattgctggggaacctacccgcaaattccattccgctgcttggaaaaacagggatgggcgccgacaattgaagcaggagatatggacctgctcgccaaagggaagcctgattttgtaggtgtcaattattatcagacgatcacctatgaacgaaatccgcttgatggtgtgtcagaagggaaaatgaatacgacaggccaaaagggaaccaatcaggagacggggatacccggagtgttcaaaacgaaaaaaaatccgcatctgacaacgagcaactgggattggacaattgacccaattgggctgcgtatcggtcttcgccgaattacaagccgctatcagcttccagtgtttataacagagaacggtttgggtgaatttgataaagttgaggacggcactgtacaggatgattatcgaattgattatttgcgttcgcatcttgagcaatgcagacaagccatcagtgacggtgtcgatttaatcggctattgcagctggtcgtttactgatctgttaagctggctgaacggctaccaaaaaagatacggatttgtatatgtcaatcgtgatgaagaaagcacatccgatttaaaacgcttgaagaaaaaaagcttttattggtatcaagatgtcatcaagacaaacggagaaagtttataaagagtccctgagagttattctctcaggggtttttcattacacagaaacagcatcaataatataagtgtcggcgtgcaaatctgacatttcagccggcacagtccagcatgtcaattgatagtctcctttaggcagatcaaaggacagtcttttagacatgatgctttcaatatgaattccgttttctgtgacatgaaaaggaacagtcacttttttttcgtaggagtttactgtttctgaactgttcaggcgaaaaagaataaaggcctttgtatttcgctgtgcctcaaaggaaatggctccgtctgccgcagcatatcctttttcaatcgcttcgtcagtccaatccattacaggaggtgtagaatccttttgaaatacagtaaattgatgatatgaaatcgaaagttcttgcggcttccatgatttgatcaatgtgctgttcctcctctatgtactgtttactgaattgtgaataaaacctttgtgccgtctgggtaatcggtaagccgatgcccgacccaagagcctgctccgcggttgtcagcgggagaaatgtattctacagaagctccctcaccgccttctttgcacatggccattggccattcatctctgtcatacccctttttggaaggtacgtcctttaatgattgctcgcggcgttcttcagctccgtctctgtcaatagtgcacacctctgagtgcccctcatttatcgcatccttaatatgcttggcagtttcgggataccggtcagatgggaaggccattgtttcatcatattctttcgtttgagacgttttttgatcagctgagaaaaagtctccttttatcaggccgacagctgcagctgctatgatgacgatgacgagaagtatcgtttttatgatgtccgtcgtgatgttcacctcccgcttttaaaactgacacaagagtaatccagaaagcatttggtgtaaaggtttaaattttatgttttacgatcagtttattgcagaaatcgtaattttagcagatcgaaatatttgttttcagcaaaatacgattgccaatttacaataatgatagtaagtcatcagccgttttcggcttgattaatcattttaaattggcttatgataccggtaagctcctcagctaattgagaaagtgtttcagaagctgcggtaatctcctccattgcagcaaattgctcctctgttaatgcagccgcttgccgggtatttttagtagattctttaatgtcggccgtattggctgcaaaggaatcatttatttgatgtgcactggctgaaatgtttgttacagatgctgataaatcactaatctcggcgctgatttcacctgttgcagctgcaatttccttaaatgcatctctggtgcgctggatcatggtgactccttctgcagcttctgttttcacatgctcaacagatcttgcagaccggttcatatccttttgtatttctatgatcagttttgaaatctgccccgcagactgttgagactcttctgctaatttccgtacttcatcagcaacaacagcaaagccttttccttgttcaccggctctggcagcttcaatcgctgcattcagcgcaagcaggtttgtctgatcagcaatttgggtgatgaccgataaaatttgctcaatttgtttagagcggccgtctaactggtgtatgatttctccgcttttctgaattgactggtgaatcgcatccatttgcgcctgtacatttgcaatttccttttgtccaatgtctgcttttgattgagcgagctgccctttgtcagcgatagcggcagtatttgcagaaatatcccggatgtctgctgaagcttgttttaatgagctttcactattttcaattcgggtgatctgatcttgggctccatttgcaatctgctgtacagcttctgtgattttttctgaagcttgatttgtttcctctgctccggctgagagctgctgagaggctgacgcaagctgaagggctgattgttgtacggtttgtatggtatcgttcagcttcattctcatcttattataatagacgcttagttctgaaagctcgtcaccggttttgtctgacacctctattgtcatatctccgtttccggcactttcaaaggcgctttttaaagcgttcagccgcttgttgatttttctggtgaaaaccaagacaaggatgactgataccataatgacgataacaagaacgatagcgaattgagtgaaaagtgattgtgtaagtgatgctaaaatactttgattagctccggtatacagcatgccgatgatgttcccattttgatcttttaacggcatgtatgcagtctgataagaagaacctgctacatctgcttgtccgtaaaaacgctttcctttctttaaaacagcggcaataacttcagaagaagcctgggtgccgacggctctttcgccatttttcatgacattggttgcaacacgagtatcgccttggaaaatggtaatggtatcacctgtcttttcaccaagcagatcaacaatatcttcatttccattgatttgtgtttgccctttatagagcttattgtttttcacctgccagtcgcctgacatgacatcatcaatataagtgctgcttaaagcgagatcacctttcgctttttcagttgccatttgtttcatgctttctgtaatttccttaagcatcacagtgccaactgatgccgaaaacaaaagaatcaccacgaaaacgaggcaaagaattttagttcctagcttcatcttaaatcgttttatcaacataattcctccctttacgatttgcaggtcatattacttatcgggtttttgggtttaaagttttattttagaaaaaataaaaccggcctgatcttcaggccggttgtgtgatgctattcaaggtttgcgtggtgagtgaacatagtttcagaatcgagaccttttttctccatgagttttaaaatcactgcatcatagaagagcagcaaagtttgttcaaataatgatcccattggctgaatggttttatagcttccgttagactggtctttaggggaaccaggcattctgatgatgaggtccgcttgttttccgatgcttgattccggattgatggttaaagcggcaacaattccgtgtaagctttttgcttttgctgcggtatgaatcaagctctttgtctcgcctgatcctgagccgataataactagatctccttcggcgagcggcggagtgagaatctcacctactatatgggcgttgaagcccatgtgcatcagtctcatcgcgaaggattttgccatcaggccagaccgccccgcacccgcggtgaaaatttggtgggatgaaagaatgtgatcggcaagctggtcagcttcttcattagaaatataagctgctgaattgtgtaactcattgagaatttccgctacgtattcagtcgttttcatcggagttatccttggacaatcagctgcttcatttttgaagctgtttccgccttatcagctgcgcttgtaattccgcccccgacaatgacaaggtcaggcttttgctggatcacttctggcagtgtatcaagtttgatgccgcccgcgattgcggtttttgcgttttttacggtatttttgattgtcgttaattcttcgaaagagtttttgccctctgcttgaagatcatagccagtgtggacgcagatgtagtcaacaccgagtgcgtcaatttctttcgcacgggattcgatatctttcacgttaatcatgtccactaagattttcttcttttgttttttggcttcttctactgcgcctttaatcgttgcatcgtctgtagcccctaaaacggtgatgatgtcagcgcctgcttccgacgctttcataatttcgtagcctccggcatccatgattttcaggtctgcaagaaccttcaattgaggaaatgcttcttttatttctttaacggctcttaggccttcattgatgacgaccggtgttccgatttcaactacgtcgatgtattgttctacctctttgacaagctcaatggcttccgggatgttgacgaggtctaatgcaagctgtaattccattgttgatccactccctttttcgaattattgttcattctataggttccttcttttgttgagaagtaggcactttgaagtcaacaagttacttggaggatactgtgaggagagacaatcagatttctttcgcttgattttatgagtgagtataatgaaaaaagagtctgcaaaaaagtaagtaagtgatgatacgtatctaacatacaaaaaggttactaagggggggattctattgagccggatggacgacaaaaggtttaattgtgagaaggaattaacgcttgcagtgattggcggtaaatggaaaatgctcattttatggcatttaggaaaagaaggcacaaaacggttcaatgaattaaaaacattgattcctgatattacgcagaagatcctcgtgaatcagctgagagagcttgagcaggatatgattgttcacagggaagtgtatccagttgtcccgccgaaggttgaatattctctgaccccgcacggagaaagcctcatgcctattcttgaagccatgtatgagtgggggaaaggctatatggaattgattgatatcgacaaaaatgtcatgaaagaatcgttgtaagacgctcttcgcaagggtgtctttttttgcctttttttcggtttttgcgcggtacacatagtcatgtaaagattgtaaattgcattcagcaataaaaaaagattgaacgcagcagtttggtttaaaaatttttatttttctgtaaataatgtttagtggaaatgattgcggcatcccgcaaaaaatattgctgtaaataaactggaatctttcggcatcccgcatgaaacttttcacccatttttcggtgataaaaacatttttttcatttaaactgaacggtagaaagataaaaaatattgaaaacaatgaataaatagccaaaattggtttcttattagggtggggtcttgcggtctttatccgcttatgttaaacgccgcaatgctgactgacggcagcctgctttaatagcggccatctgttttttgattggaagcactgctttttaagtgtagtactttgggctatttcggctgttagttcataagaattaaaagctgatatggataagaaagagaaaatgcgttgcacatgttcactgcttataaagattaggggaggtatgacaatatggaaataactttttaccctttaacggatgcacaaaaacgaatttggtacacagaaaaattttatcctcacacgagcatttcaaatcttgcggggattggtaagctggtttcagctgatgcgattgattatgtgcttgttgagcaggcgattcaagagtttattcgcagaaatgacgccatgcgccttcggttgcggctagatgaaaacggggagcctgttcaatatattagcgagtatcggcctgttgatataaaacatactgacactactgaagatccgaatgcgatagagtttatttcacaatggagccgggaggaaacgaagaaacctttgccgctatacgattgtgatttgttccgtttttccttgttcaccataaaggaaaatgaagtgtggttttacgcaaatgttcatcacgtgatttctgatggtatctccatgaatattctcgggaatgcgatcatgcacatttatttagaattagccagcggctcagagacaaaagaaggaatctcgcattcatttatcgatcatgttttatctgaacaggaatatgctcaatcgaagcggtttgaaaaggacaaggcgttttggaacaaacaatttgaatcggtgcctgaacttgtttccttgaaacggaatgcatccgcagggggaagtttagatgctgagaggttctctaaagatgtgcctgaagcgcttcatcagcagattctgtcgttttgtgaggcgaataaagtcagtgttctttcggtatttcaatcgctgctcgccgcctatttgtacagggtcagcggccagaatgatgttgtgacgggaacatttatgggcaaccggacaaatgcgaaagagaagcagatgcttggcatgtttgtttctacggttccgcttcggacaaacattgacggcgggcaggcgttttcagaatttgtcaaagaccggatgaaggatctgatgaagacacttcgccaccaaaagtatccgtataatctcctaatcaacgatttgcgtgaaacaaagagctctctgaccaagctgttcacggtttctcttgaatatcaagtgatgcagtggcagaaagaagaggatcttgcctttttgactgagccgattttcagcggcagcggattaaatgatgtctcaattcatgtaaaggatcgatgggatactgggaaactcaccatagattttgattaccgcactgatttattttcacgtgaagaaatcaacatgatttgtgagcgcatgattaccatgctggagaacgcgttaacgcatccagaacatacaattgatgaattaacactgatttctgatgcggagaaagagaagctgcttgcgagggccggcggtaaatctgtgagctaccgtaaggacatgacgataccagagctgttccaagaaaaggctgaactgctttctgatcatccagcggttgtatttgaagatcgcacattgtcctatcgaacgttacatgagcaatctgcacgcatcgccaatgtgctgaaacagaaaggggttggcccggacagtcctgtcgcggttttgattgaacgctctgaacggatgattacagctatcatgggaattttaaaagccggcggagcctatgtgccgattgatccgggttttcctgctgagcgcattcaatatattttggaggactgcggggcggatttcatcctgactgaatcgaaggttgcggcgcctgaagccgatgctgagctgattgacttagatcaggcgattgaggaaggtgcagaagaaagcctgaatgcagatgtgaacgctcggaaccttgcctacattatttacacatcgggaacaaccggacgcccgaaaggcgttatgatcgagcatcgccaggttcatcatttggttgaatctctgcagcagacgatttatcaaagcggcagccaaaccctgcggatggcattgcttgcgccgttccactttgatgcgtcagtgaagcagatcttcgcgtcgcttcttttgggccaaaccctttatatcgtaccgaagaaaacagtgacgaacggggccgcccttactgcatattatcggaagaacagcattgaggcgacggacggaacaccggctcatttgcaaatgctggcagcagcaggcgattttgaaggcctaaaactgaagcacatgctgatcggaggagaaggcctgtcatctgttgttgcggacaagctgctgaagctgtttaaagaagccggcacagcgccgcgtttgactaatgtgtacgggccgactgaaacgtgcgttgacgcgtctgttcatccggttatccctgagaatgcagttcaatcagcgtatgtgccgatcgggaaagcgctggggaataaccgcttatatattttggatcaaaaaggccggctgcagcctgaaggcgtggcgggtgagctttatatcgcgggagacggtgtgggccgaggctatttacatttgcctgaattaacggaagagaagtttttacaagatccattcgtgccgggcgatcgcatgtaccggaccggggacgtggtgcgctggcttccagatggaacaatcgaatatttaggcagagaggatgaccaggtcaaagtccgcggataccggattgagcttggggaaattgaagccgtgattcagcaggcgccagacgttgcaaaagccgttgttttggcacgccctgacgaacagggaaatcttgaggtttgcgcatatgttgtgcagaagcctggaagcgaatttgcgccagccggtttgagggagcatgcggccagacagcttcctgactatatggtgccggcttactttacagaagtgacagaaattccgcttacaccaagcggcaaagtcgaccgccgcaagctgtttgcactagaggtgaaggctgtcagcggcactgcctatacagcgccgcgaaatgagactgaaaaagcaatcgcagccatttggcaggacgtgctgaacgttgagaaggcggggatctttgacaatttctttgaaactggcggacattcattaaaagccatgacccttttaacaaagattcataaggaaacaggcattgagattccgcttcaatttttgtttgagcatccgacgattacggctcttgcagaggaagctgatcacagagaaagcaaagcttttgcggtgattgaacctgctgaaaaacaggagcattacccgctttcattggcacagcagcgaacatatatcgtcagccagttcgaggatgcgggagtcggctataacatgccagcagcagcaattctggaagggcctttagatattcaaaagctggagcgcgcatttcagggattaatccgacgccacgagtcattgagaacatcatttgttcttgaaaacagcacgccgagacagaaaattcacgatagcgttgatttcaacatcgaaatgattgaaagaggcggccgctcagatgaggcaattatggcttcattcgttcggacatttgatttggcgaaagctccgctgttcagaatcggtttgctggggcttgaagagaaccgtcatatgctgctgtttgacatgcaccatttgatttctgacggtgtatccattggcattatgctggaggagttagcacgcatttataaaggcgaacagcttcctgatcttcgtctccagtataaggactacgctgtatggcaaagcagacaggctgctgaagggtacaagaaggaccaggcttattggaaggaagtctttgcaggcgagctcccggtgcttcagcttctgtccgattacccaagaccacctgttcaaagctttgaaggggatcgggtgtcaatcaagctggatgcgggggtaaaggatcgcctcaatcgtttggctgaacaaaacggcgccactttatatatggtgatgctttccgcttactatacgcttttgtcaaagtatacggggcaggatgacatcattgtcgggacaccgtcagcgggcagaaatcactccgatacagagggcattatcgggatgttcgtcaatacgcttgcgattcgcagtgaggtgaagcagaatgagacgtttacccaattgatctcgcgtgtccgcaaacgggtgctggatgccttttctcatcaggactatccgtttgagtggcttgttgaagatttgaacatcccgcgtgatgttagcaggcatccgctgtttgacacgatgttcagccttcaaaacgcgacagagggcattccggctgtcggcgatctttccttgtctgttcaagagaccaatttcaagattgccaaatttgatttgacggtgcaggcgagagaaaccgatgaaggcattgagattgatgtggattacagcacaaagctgtttaaacaaagcacggcagacaggctgcttacgcattttgcgcgtttgcttgaagatgctgcggctgatccagagaagccgatttctgagtataagcttctttctgaagaggaggctgcttcgcaaattcagcagtttaacccgggcagaacaccttatccgaaagataaaacaattgttcagctgtttgaggagcaagcggcgaatacgccagaccacactgcgcttcaatatgaaggcgaatcactcacttatcgtgaactgaatgaacgggccaatcgtttagcccgcggcattctttctcttggagctggcgaaggcagaactgcggctgtcttatgcgagcggtcaatggatatgattgtgtcgatcttggcagtattaaaatcaggttcggcttatgttccgatcgatccggaacatccgattcagcggatgcagcatttcttccgtgacagcggagcaaaggtgcttctcactcagaggaaattaaaggctttggcggaagaagcggaatttaagggcgttatcgtgctagccgatgaggaagaaagctatcatgccgatgcgcgaaatctcgcactgcctcttgattctgcagcaatggccaacctgacgtatacttccggaacgactggaacacctaaggggaatatcgtgacacatgccaatattctccgcacggtgaaggaaacgaattatctcagcattacagaacaggatacgattctcggtctttccaattacgtgtttgacgcgtttatgttcgatatgttcggctctttgttaaacggagccaagctggtgctgataccgaaggaaaccgttttggacatggctcgcctgtcccgcgtcattgaacgggagaacatcagcattctcatgattacaaccgctttgttccacttgcttgtggacttgaatccggcatgcttgtcaacgcttcgcaagattatgtttggcggggaacgggcttcggttgagcatgtcagaaaagctttgcaaacggttggaaagggcaagctccttcatatgtatggaccgtctgaaagcacggttttcgcgacgtatcatccggttgatgaattggaggagcacacgctgtctgttccgattggaaaaccggtcagcaatacggaagtatacattcttgaccgtacgggacacgtgcagcctgccgggattgccggagagctttgcgtcagcggcgaaggactcgtgaaaggctattacaaccgtccagaactgactgaggagaaatttgttccccatccgtttacatccggcgaacgcatgtataaaacgggagaccttgcgagatggctgccgaatggcgacatcgaatttatcgggcgaatcgaccatcaggtgaagattcgcggacagcgcatcgagcttggagaaatcgaacatcagctgcaaacccatgatcgtgttcaggaaagtgttgtgcttgccgttgatcaaggagcgggagataaactgttgtgtgcttactatgtcggagaaggagacatctcatcacaagagatgagagagcatgctgcgaaggacttgccggcatatatggttcctgcggtgtttatccaaatggacgagctgccgctgacagggaacggaaaaattgaccggagagcgctgccgattcctgatgccaacgtttcaagaggtgtttcatatgttgcgccacgcaatggaacggaacaaaaagtcgcggacatttgggcacaggtacttcaggcagaacaagtcggcgcttatgaccacttctttgacattggcggacattcattagcaggcatgaagatgcttgccttggttcatcaggaactgggcgttgagctgtcactcaaggatctcttccagtcaccgacggttgagggcttggcacaggtgattgcctctgctgaaaaagggacagccgcaagtatcagcccggcagagaaacaagatacgtatcctgtttcttcaccgcaaaaacggatgtacgtgcttcagcagcttgaggatgcgcaaacgagctataacatgccggcggttctgcgcctgacaggtgagcttgatgttgaaaggcttaacagcgtcatgcagcagttaatgcagcgtcatgaagccttgagaaccacgtttgaaataaaagatggagaaacggtgcagcggatctgggaagaggctgagtgcgagatagcctatttcgaagccccggaagaagagacagagcggatcgtttctgagtttattaagcctttcaaaatcgaccaacttccactgttcagaatagggcttatcaagcattcagacactgagcatgtgctgctgttcgatatgcatcatattatttctgatggtgcatctgtcggtgtgctgattgaggagctttcaaagctgtacgacggagaaacccttgagccgctccgtattcaatataaggattatgccgtgtggcagcagcagttcattcagtctgagctttacaagaagcaagaagagcattggctgaaggagctggacggagagctgccggtgctgacgcttccgactgattacagtcggcctgccgttcaaacatttgagggagaccgcattgcattttcattagaagcaggcaaagctgatgctctgcgcaggcttgcaaaagaaacggattccacgctttacatggtgcttctggcttcatacagtgcgtttttatcaaaaattagcgggcaagacgatatcatcgtcggttcacctgtggccggacgatctcaagcggacgtcagccgcgtcatcggaatgttcgtcaatacattggcgctgcgcacgtatccgaagggtgaaaagacgtttgctgactatcttaacgaagtgaaagaaacggcactcagcgcttttgatgcgcaggattacccacttgaggatttgatcggaaatgttcaggttcagcgtgacacaagcagaaatccgttattcgatgcagttttttcaatgcaaaatgcgaatataaaggatttaacaatgaaagggattcagcttgagccgcatccgtttgaacggaaaacagccaagtttgacctcacgctgacggctgacgaaaccgacggagggcttacattcgtactcgaatacaatacagctctgtttaagcaggaaacgattgaacgatggaagcaatattggatggagcttttagatgcagttactgggaacccgaaccagccgctttccagcctgtcactggtcaccgagacagaaaagcaagcgcttcttgaggcatggaagggcaaagcgctgcctgtgccgacagacaaaacggttcatcagctattcgaagagactgcccagcgccacaaagaccgcccggctgtcacatacaacggccagtcttggacgtacggcgagctgaatgcgaaggcaaaccgtctcgcgcggattctgatggactgcggcatcagcccggatgaccgcgtcggcgttctcacgaagccgtcgcttgaaatgtccgccgcggtgctcggcgtcttgaaagccggagcggcgtttgtgccgattgatcctgactatccggatcagcggattgagtatattttacaggacagcggcgcgaagcttctcttgaaacaggaaggcatttcagtgccggacagctatacgggagatgtcattcttctcgacggaagccgcacgattctaagcctgccgcttgatgaaaacgacgaggaaaatccagaaaccgctgtaaccgcggagaacttggcgtacatgatttacacgtctggaacgaccggacagccgaagggtgtcatggtcgagcaccatgcgcttgtgaacctgtgcttctggcaccacgacgcgttcagcatgacagcggaggaccgcagtgcgaagtacgcgggctttgggttcgacgcttccatttgggagatgttcccgacctggacgatcggtgccgaacttcacgtcattgaggaagcgatccgcctcgatatcgtccgcctgaacgattattttgaaacgaacggcgtaacgatcacgttcctgccgacacagcttgcggaacagttcatggagcttgagaacacatcacttcgcgtattgcttactggaggagacaagctgaagcgcgcagtgaaaaagccgtacacactcgtcaataactacgggccgacagagaatacggtcgttgccacaagcgcagaaatccatccggaggaaggctcgctttccatcggaagggccattgccaatacgagagtatacattctcggcgagggcaatcaggtgcagccggaaggcgtagccggagagctttgcgtggcggggcgcggactggcacgcggctatctgaatcgagaagacgaaaccgcgaagcggtttgtcgctgatccgtttgtgccgggtgagcgcatgtaccgcaccggcgatttggtgaaatggacgggcggcggcatcgaatacatcggccggatcgaccagcaggtcaaggtccgcggctaccggatcgagctctcagaaattgaagtccagctcgcccagctttctgaggtgcaggatgcggcggtgacagctgtcaaagataaaggcggcaacacagcgatcgcggcgtatgtcacaccggaatcagctgacatagaagcactgaaatcagcactgaaggaaaccctgccggattacatgatcccggcgttctgggtgacgctgaacgagcttccggttacggcaaacggcaaagtggaccgcaaagccttgcctgagccggacatcgaagcgggaagcggagaatacaaagcgccgacgaccgacatggaagagctgcttgccggcatctggcaggacgtgcttggaatgtctgaagtcggtgtcaccgacaatttcttctcgcttggcggagattccatcaaaggaattcaaatggcgagccgcttgaaccagcacggctggaagctggaaatgaaagatctcttccagcacccgacgatcgaagagctcacccagtacgtagagcgtgccgaaggcaaacaggcagaccaaggcccggtggagggcgaagtcatcctgacgccgatccagcgctggttctttgaaaagaacttcacgaacaagcaccactggaaccaatctgtgatgcttcacgccaagaagggctttgatcctgaacgggtggagaaaacattgcaggcgctgatcgagcatcatgacgcgctccgcatggtctatcgtgagggacaggaagacgtcattcaatacaacagaggtcttgaagctgcttcagctcaattggaggtcatccagattgagggccaagctgcagattacgaagaccgaatagagagagaagcggagcgtttgcaaagcagcatcgacttgcaggaaggcggcttgttaaaagcaggcttgttccaagcggaagacggagatcacttgcttcttgccattcaccacttagtggttgacggcgtgtcgtggcggattttactggaggatttcgccgcggtatatacacagcttgagcaaggcaatgaaccggttctcccgcagaaaacacattcatttgcagagtatgcagagagattgcaagacttcgcgaactccaaagcctttttgaaagaaaaagagtattggagacagcttgaagaacaagctgttgcggcaaagcttccgaaagaccgcgaatctggtgatcagcgaatgaaacatacaaagacaattgaattctcgctgactgctgaagagacagaacagctcaccacaaaggtgcatgaggcatatcacacagaaatgaatgatattttgctgacggcattcggattggcaatgaaggagtggacgggtcaagatcgagtaagtgttcatttagaggggcatggacgtgaagaaatcatagaagacctgaccatttctcgcacagtcggctggtttacaagtatgtacccaatggtgctcgatatgaagcatgcggatgatctgggctaccagctgaagcaaatgaaagaagatatcagacatgtgccgaataagggagtcggatacggcattctgcgctatctgacggcaccggaacataaagaagatgtggcgttctcgattcagccggatgtcagcttcaactatttaggtcagtttgacgaaatgtcggatgcaggtttgtttacgagatcagagctgccatcaggacagtcattaagccctgaaacagaaaaaccgaatgcgctggatgttgtcggatatatcgaaaacggaaaactgacgatgtcactggcctatcattctcttgaatttcatgaaaaaacagtacaaacattcagtgacagctttaaagcgcatcttctcagaatcattgaacattgcctatctcaagatggtacggaactgaccccgagtgatcttggtgacgacgatttgacgctggatgagctggataaattaatggaaattttctaatagaggtggcatatgagcaaaaaatcgattcaaaaggtgtacgcactgacaccaatgcaggagggaatgctgtatcatgcgatgcttgatccgcattcttcctcgtacttcacacaattagagcttgggattcacggcgcttttgatcttgaaatctttgagaaaagcgtcaatgaactgattcggtcatacgatattctccgtacggtatttgtgcatcagcagctgcaaaaaccgcgtcaggtcgtgttagcggaacgcaaaacaaaagtgcattatgaggatatcagtcatgcagacgaaaaccgccagaaagagcacattgagcgttacaaacaagacgttcagcgccaaggctttaacctggcaaaagacatattgttcaaggtagcggttttccgccttgctgcagatcagctgtatcttgtctggagcaatcatcatattatgatggacggctggagcatgggcgtcctcatgaaaagcctgttccaaaactatgaagcgctcagagcaggcaggacaccggcaaacggtcagggcaagccttattccgattacatcaagtggcttggaaaacaggacaatgaagaagcggagagctactggagcgagcgcttggcgggttttgaacagccaagcgtgctcccgggccgcctgcctgtgaaaaaagacgaatacgtcaataaagaatattcatttacatgggacgaaacactggttgcccgtattcagcaaaccgcaaatctccatcaagtgacagggcctaacctatttcaggccgtttggggcattgttctcagcaaatacaactttacggatgatgtgatcttcggaacggtcgtctcgggacgaccgtctgaaatcaacggaatcgaaacgatggcggggctgtttatcaacaccattccagtgcgggtgaaagttgaacgagatgctgcattcgctgatattttcacagctgttcagcagcatgcagtagaggcagagcgttacgattacgtgccgctctatgagattcaaaaacgctcagctcttgatggcaatctcttaaaccatctggtcgcgtttgaaaattatccgcttgatcaagagcttgaaaacggcagcatggaagaccgcctcgggttttcgattaaggtagaaagcgcatttgaacaaacgagcttcgatttcaacctgattgtgtatccgggcaaaacgtggaccgtcaaaattaaatataacggagccgcctttgattccgcttttatcgaacggacagcggagcaccttacccgcatgatggaagcagctgtcgatcagccggccgcttttgtgcgtgagtacgggcttgtgggagacgaagagcagcggcaaattgtcgaggtgtttaacagcacgaaagccgaactccctgaaggaatggctgttcaccaagtgtttgaagagcaagcgaaacggacgccggcgagcaccgccgtcgtatatgaaggaaccaagctgacgtaccgcgagctgaatgcagcggctaaccgtctggcgagaaagcttgtcgaacatgggcttcaaaaaggggaaacagcagcgattatgaacgaccgctcagtagaaaccgttgtcggcatgctggctgttttaaaagcaggcgccgcatatgtgccgcttgatccagcgcttcctggggatcgtcttcgtttcatggcagaggacagctccgttcgaatggttttgatcggaaattcttatacagggcaggcacatcagctgcaagtgccggttcttacactggacataggctttgaagagagtgaagcggctgacaatctcaacctgccatccgccccgtctgatttggcgtacatcatgtacacatccggttcaacgggcaaaccgaaaggcgtcatgatcgaacataaaagcattctgcgcctcgtcaaaaatgccgggtacgttcctgttactgaagaagaccgcatggcgcaaacgggagctgtcagctttgatgccggaacgtttgaggtattcggcgcactgctgaatggcgcagcactttatccggtcaaaaaagagacactgcttgatgcgaaacaatttgctgcattcctgcgtgagcaaagcatcacaactatgtggctgacatcacctttattcaaccagcttgctgcaaaggatgcgggtatgttcggcacactgcgccatttaatcatcggcggagatgcccttgtcccgcatattgtcagcaaagtaaaacaggcatcgccgtcgctttcattgtggaacggatacggcccgacagaaaacacgacgttttcaaccagttttctgatcgaccgcgagtatggcggctctatcccaatcgggaagccgatcggaaattccactgcctatattatggatgagcagcaatgcctgcagccaatcggcgcgcctggtgagctttgcgtaggcggaatcggtgtagcgcgtgggtatgtcaatctccctgagctgacggagaagcaatttctggaagacccgttcagaccgggtgagagaatttaccgcactggtgacttggcaagatggctgccggacggcaatatcgaatttttaggcagaatcgacaaccaagtgaaggtgcgcggcttccgaattgagcttggcgaaattgaaacaaaactgaacatggctgagcatgtgacagaagccgcggtgatcatacgcaagaacaaagcagacgaaaatgaaatttgcgcgtacttcacggcggatcgtgaagtggctgtgagtgagctgagaaaaacactgtctcagtctttgcctgactatatggtccctgcccacctgattcaaatggacagcctgccgctcacgccaaacgggaaaatcaacaaaaaggaactgcctgcaccgcaatcagaagccgtgcagccggaatacgcagcaccaaaaacagagagtgaaaagaaattagcggagatctgggaaggaatactcggcgtcaaagcaggcgttaccgataacttctttatgatcggcggccattctttgaaagcgatgatgatgacggcgaaaattcaagagcattttcataaggaagttccgataaaagtgctttttgaaaagccgactattcaagaactggcactgtatttggaagagaacgaaagcaaggaggagcagacgtttgaaccgatcaggcaagcatcttatcagcagcattatcctgtatccccggcccagcggagaatgtatatcctcaatcagcttggacaagcaaacacaagctacaacgtccccgctgtacttctgctggagggagaagtagataaagaccggcttgaaaacgcgattcagcaattaatcaaccggcacgaaatcctccgtacatcgtttgacatgatcgacggagaggttgtgcaaaccgttcataaaaacatatcgttccagctggaggctgccaagggacgggaagaagacgcggaagagataatcaaagcatttgttcagccgtttgaattaaaccgcgcgccgctcgtccgttcgaagcttgtccagctggaagaaaaacgccacctgctgctcattgatatgcatcatattattactgacggaagttcaacaggcattctaatcggtgatcttgccaaaatatatcaaggcgcagatctggaactgccacaaattcactataaagattacgcagtttggcacaaagaacaaactaattatcaaaaagatgaggaatactggctcgatgtctttaaaggcgaactgccaatactggatcttcccgcggatttcgagcggccagctgaacggagctttgcgggagagcgcgtgatgtttgggcttgataagcaaatcacggctcaaatcaaatcgctcatggcagaaacagatacgacaatgtacatgtttttgctggcggcgttcaatgtactcctttccaagtacgcgtcacaggatgatatcattgtcggctcgccgacagctggcagaacacatcctgatctgcaaggtgtgccgggtatgtttgtcaacacggtggcactcagaacggcaccagcgggagataaaaccttcgcgcaattccttgaagaggtcaaaacagccagccttcaagcattcgagcaccagagctatccgcttgaggagctgattgaaaagcttccgcttacaagggatacaagcagaagtccgctgttcagcgtgatgttcaacatgcagaatatggagattccttcattaagattaggagatttgaagatttcctcgtattccatgcttcatcatgttgcgaaatttgatctttccttggaagcggtcgagcgtgaagaggatatcggcctaagctttgactatgcgactgccttgtttaaggacgagacgatccgccgctggagccgccactttgtcaatatcatcaaagcggccgcggctaatccgaacgttcggctgtctgatgtagatctgctttcatctgcagaaacggctgctttgctagaagaaagacatatgactcaaattaccgaagcaacctttgcagcactttttgaaaaacaggcccagcaaacacctgaccattctgcggtgaaggctggcggaaatctgttgacctatcgcgagcttgatgaacaggcgaaccagctggcgcatcatcttcgtgcccaaggggcaggaaatgaagacatcgtcgcgattgttatggaccggtcagctgaagtcatggtatccattctcggtgtcatgaaggcgggggcagctttccttccgattgatcctgatacacctgaagaacgaatccgttattcattagaggacagcggagcaaaatttgcggtcgtgaatgaaagaaacatgacggctattgggcaatatgaagggataattgtcagccttgatgacggtaaatggagaaatgaaagcaaggagcgcccatcatccatttccgggtctcgcaatcttgcatacgtcatttatacgtccggtacgaccggaaagccaaagggcgtgcagattgagcatcgtaatctgacaaactatgtctcttggtttagtgaagaggcgggcctgacggaaaatgataagactgtattgctttcatcttacgcatttgaccttggctatacgagcatgttccctgtacttctgggcgggggcgagctccatatcgtccagaaggaaacctatacggcgccggatgaaatagcgcactatatcaaggagcatgggatcacttatatcaagctgacaccgtctctgttccatacaatagtgaacaccgccagttttgcaaaagatgcgaactttgaatccttgcgcttgatcgtcttgggaggagaaaaaatcatcccgactgatgttatcgccttccgtaagatgtatggacataccgaatttatcaatcactacggcccgacagaagcaacgatcggcgccatcgccgggcgggttgatctgtatgagccggatgcatttgcgaaacgcccgacaatcggacgcccgattgcgaatgccggtgcgcttgtcttaaatgaagcattgaagcttgtgccgcctggagcgagcggacagctctatatcacgggacaggggctcgcgagagggtatctcaacaggcctcagctgacagccgagagatttgtagaaaatccatattcgccgggaagcctcatgtacaaaaccggagatgtcgtacgaagactttctgacggtacgcttgcatttatcggccgggctgatgatcaggtgaaaatccgaggctaccgcattgagccgaaagaaattgaaacggtcatgctcagcctcagcggaattcaagaagcggttgtactagcggtttccgagggcggtcttcaagagctttgcgcgtattatacgtcggatcaagatattgaaaaagcagagctccggtaccagctttccctaacactgccgtctcatatgattcctgctttctttgtgcaggttgacgcgattccgctgacggcaaacggaaaaaccgacagaaacgctctgccgaagcctaacgcggcacaatccggaggcaaggccttggccgcaccggagacagcgcttgaagaaagtttatgccgcatttggcagaaaacgcttggcatagaagccatcggcattgatgacaattttttcgatttaggcggccattcattaaaagggatgatgctgattgccaacattcaggcggaattggagaaaagcgtaccgcttaaagcactgttcgagcagccgacagttcgccagctggcggcttatatggaggcgtctgctgtttcaggcggccatcaagtactcaaaccggctgacaagcaggatatgtatccattgtcatccgcacagaaacgaatgtacgtgctcaatcagcttgaccgccagacgataagctacaacatgccatctgttcttctaatggaaggagagcttgatatttcgcgcctgcgcgactcactcaatcagcttgtgaaccgtcacgaatcattgcggacgtcatttatggaagctaatggtgagcctgttcagcgcatcattgagaaggcggaggttgatcttcatgtgtttgaagccaaagaagacgaagcggaccaaaagattaaggaatttatccggccattcgacttaaacgacgcaccgctcattcgcgcagctttgcttcgaatagaagcgaaaaaacatttgctgcttttagatatgcatcatatcatcgcagacggcgtctcaagaggcatctttgtaaaagaattggcgctgctttacaaaggagagcagcttccggagccgacgcttcattataaagatttcgccgtttggcaaaatgaagctgagcaaaaagaacggatgaaggagcatgaggcgtactggatgtcagttctttcaggcgagctgccagagcttgatctcccgctcgattatgcccgtccgcctgtgcaaagctttaaaggagatacgatccgtttccgtacgggaagtgagacggcaaaggcggtagaaaaactgcttgccgaaaccggaacgaccttgcacatggtgctccatgctgttttccacgtctttttaagcaaaatttccggacagcgggatatcgtcatcggctccgttactgccggccggacgaatgctgatgttcaggacatgccgggaatgttcgtcaatacacttgccctgagaatggaagcgaaagaacagcaaacatttgcggagcttttggagctagcaaagcagacgaacctgtcagcccttgagcatcaggagtatccgtttgaagatctggttaatcagcttgatctccctcgggatatgagccgaaacccattgtttaatgtgatggtgacgacagaaaaccctgataaagaacagcttacattgcaaaatctgagcatttcaccttatgaggctcatcagggaacttctaagtttgatctgacactgggcggatttactgatgaaaatggcattggcttgcagctcgaatatgcgacagatctgttcgcaaaagaaacagctgaaaaatggagcgaatacgttctgcggctactaaaggctgttgcggataacccgaaccagccgctttccagtctgttactggtcaccgagacagaaaagcaagcgcttcttgaggcatggaagggcaaagcgctgcctgtgccgacagacaaaacggttcatcagctattcgaagagactgtccagcgccacaaagaccgcccggctgtcacatacaacggccaatcttggacgtacggcgagctgaacgcgaaggcaaaccgcctcgcccggattctgatggactgcggcatcagcccggatgaccgcgtcggcgttctcacgaagccgtcgcttgaaatgtccgccgcggtgctcggcgtcttgaaagccggagcggcgtttgtgccgattgatcctgactacccggatcagcggattgagtatattttacaggacagcggcgcgaagcttctcttgaaacaggaaggcatttcagtgccggacagctatacgggagatgtcattcttctcgacggaagccgcacgattctaagcctgccgcttgatgaaaacgacgagggaaatccagaaaccgctgtaaccgcggagaacttggcgtacatgatttacacgtctggaacgaccggacagccgaagggtgtcatggtcgagcaccatgcgcttgtgaacctgtgcttctggcaccacgacgcgttcagcatgacagcggaggaccgcagtgcgaagtacgcgggcttcgggttcgacgcttccatttgggagatgttcccgacctggacgatcggcgctgaacttcacgtcattgatgaagcgatccgcctcgatatcgtccgcctgaacgattattttgaaacgaacggcgtaacgatcacgttcctgccgacacagcttgcggaacagttcatggagcttgagaacacatcacttcgcgtcctcttgaccggaggagacaagctgaagcgggcagtgaaaaagccgtacacactcgtcaacaactacgggccgacagaaaatacggtcgttgccacaagcgcagaaatccatccggaggaaggctcgctttccatcggacgggccattgccaatacgagagtatacattctcggcgagggcaatcaggtgcagccggaaggcgtagccggagagctttgcgtggcggggcgcggactggcacgaggctatctgaatcgagaagacgaaaccgcgaagcggtttgtcgctgatccgtttgtgccgggtgaacgcatgtaccgcaccggcgacttggtgaagtgggtgaacggcggcatcgaatacatcggccggatcgaccagcaggtcaaggtccgcggctaccggatcgagctctcagaaattgaagtccagctcgcccagctttctgaggtgcaggatgcggcggtgacagctgtcaaagataaaggcggcaatacagcgatcgcggcgtatgtcacaccggaaacagctgacatagaagcactaaaatcaacactaaaggaaaccctgccggattacatgatcccggcgttctgggtgacgctgaacgagcttccggttacggcaaacggcaaagtcgaccgcaaagccttgcctgagccggacatcgaagcgggaagcggagaatacaaagcgccgacgaccgacatggaagagctgcttgccggcatctggcaggacgtgcttggaatgtctgaagtcggtgtcaccgacaatttcttctcgcttggcggagattccatcaaaggaattcaaatggcgagccgcttgaatcagcacggctggaagctggaaatgaaagatctcttccagcatccgacgatcgaagagctcacccagtacgtagagcgtgccgaaggcaaacaggcagaccaaggcccggtggagggcgaagtcatcctgacgccgatccagcgctggttctttgaaaagaacttcacgaacaagcaccactggaaccaatcggtgatgcttcacgccaaaaagggctttgatcctgaacgggtggagaaaacattgcaggcgctgatcgagcatcatgacgcgctccgcatggtctaccgcgaggaaaacggggacatcgttcaggtgtataaaccgatcggtgagagcaaggtcagcttcgaaatcgtggatctgtacggctccgatgaagagatgctgagaagccagattaagcttctcgcgaacaagctgcaaagcagtctcgatctgcgaaacgggccgcttttaaaggcggagcaatatcgcacagaagctggggatcacctgctcattgctgtacaccatctcgtggtcgacggtgtgtcatggcggattttgcttgaagactttgcttcaggctacatgcaggctgagaaagaagagagccttgtcttcccgcaaaaaacaaactccttcaaggattgggcggaagaactggcggcattcagccaatcagcgcatcttttacagcaggctgaatactggtcgcaaattgccgctgaacaggtttctcctttacctaaggattgtgaaacagagcagcggatcgtcaaggatacatcatctgtcctatgtgaattaacggcagaagacactaagcatcttttaacagatgttcatcagccatatggaactgaaatcaacgatattcttctcagcgcgctcggtttgacaatgaaagaatggacaaagggggccaaaattggcattaaccttgagggacacggccgggaggacattatcccgaatgtgaatatctccagaacggtcggctggtttacggcacaataccctgttgtgctcgacatatctgacgcagatgcctcagctgtgatcaaaacagtcaaagaaaacctgcgccgcattccggacaaaggtgttggctacggcattcttcgttatttcacagaaacagcggaaacaaagggcttcacaccggagatcagcttcaactatttgggccaattcgacagtgaagtcaaaaccgatttctttgaaccgtccgctttcgatatggggcgccaagtaagcggagaatcagaggcgctgtacgcattaagcttcagcggcatgatcagaaacggccggtttgtgctttcctgctcctacaatgagaaggagtttgaaagagctacagtcgaggagcaaatggaacggtttaaagaaaacctcctgatgctaatccgccattgcacggaaaaagaagacaaggaattcacaccaagcgacttcagcgccgaagaccttgaaatggacgagatgggagatatctttgacatgcttgaggagaatttaaaataaaacgcaagggaattacagaaggcgggagcgaaacatatgagtcaatttagcaaggatcaggttcaagatatgtattacctatcgccgatgcaggaagggatgctttttcatgccatcctgaatcccggccaaagcttttaccttgaacaaatcacgatgaaagtaaaaggcagcttgaatatcaaatgtcttgaagaaagcatgaatgtgatcatggaccggtacgatgtatttcgtaccgtgttcattcacgaaaaagtaaaaaggcctgtccaagtcgtattgaaaaaacggcagttccatatagaagaaatcgatctgacacacttaacgggcagcgagcaaacagccaaaatcaatgagtacaaagaacaggataagatcaggggttttgatttgacgcgggatattccgatgcgggcagccattttcaagaaagctgaagaaagctttgaatgggtgtggagctaccaccacattattttggacggatggtgcttcggcatcgtcgtacaggatctatttaaggtatacaatgctctgcgcgaacaaaagccgtacagcctgccgcccgtcaaaccgtataaagactacatcaagtggcttgaaaagcaggataaacaagcatcactgcgttactggcgcgaatatttagagggctttgaaggacaaacgacgtttgcggagcaaagaaagaaacaaaaggacggctatgagccgaaagagctgctcttttcactgtcggaggcggaaacaaaggcctttaccgagcttgcaaaatcgcagcataccactttgagtacggcgctgcaggcagtctggagcgtattgatcagccgctatcagcagtctggcgatttggccttcggtacagttgtttcagggcgtcccgcggaaatcaaaggcgttgaacatatggtcgggctgtttatcaacgttgtcccgagacgtgtgaagctgtctgagggtatcacatttaacggcttgctcaagcggctgcaggagcaatcgctgcagtccgagccgcatcaatatgtgccgctttatgacatccaaagccaggccgatcagccgaaactgattgaccacatcattgtttttgagaactatccgcttcaggatgcgaaaaatgaagaaagcagtgaaaacggctttgatatggtggatgttcatgtttttgagaagtcgaattatgatctcaacctgatggcttccccgggagatgagatgctgattaagcttgcctataatgagaatgtgtttgatgaggcgtttatcctgcgcttgaaatctcagcttcttacagcaattcagcagctcatccagaatcctgatcagcctgtcagcacgatcaacctcgttgacgacagggagagagaatttttgctaaccggcttaaacccgccggctcaagctcatgaaacaaagcctctgacgtattggttcaaggaagcagtgaacgccaatccggatgcaccggcgcttacgtattccggccagaccctgtcttatcgcgaattagatgaggaagcgaaccgcattgcacgccggctgcaaaaacacggtgcgggcaaaggctctgttgtagcgctgtacacgaagcgctcacttgaactggtgatcggcattctcggtgtattaaaggcgggagcagcctatctgccggttgatccgaagctgccagaggaccgaatctcgtatatgctggctgacagtgcggcagcctgtcttctgacgcatcaggagatgaaagaacaagcggctgagctgccgtatacaggcacaacgctcttcattgatgatcaaacacggtttgaagaacaggcaagcgatcctgcaaccgcgattgatcctaatgatccggcatatatcatgtacacgtccggcacaaccggaaagccaaagggcaatatcaccactcatgccaatattcaaggattggtcaagcatgtagactacatggcattttctgatcaggatacgttcttgtctgtttcgaattacgcctttgatgcatttacctttgatttctatgcttctatgctgaatgcggcacggctcattatcgcagatgaacatacgctgcttgatacagaacggctcacagatctgatcctgcaagagaatgtcaatgtcatgtttgcgacaaccgcactatttaatcttctcacagatgcgggagaggattggatgaaggggcttcgctgtatattattcggcggagagcgcgcgtcagtgcctcatgtcagaaaagcgctgcggatcatggggccgggcaagctgattaactgctacgggccgactgagggaacagtgtttgcgacagctcacgtcgtgcatgatctgccggattccatctcctcattgccgatcggaaagccgatcagcaatgccagtgtttatattctgaatgagcaaagccagctccagccattcggggcggtcggtgaactgtgcatcagcggaatgggcgtgtcaaaagggtatgtaaatcgtgctgacctcacgaaggaaaagtttatcgagaacccgttcaagccgggagaaacgctttaccgtacaggggatttagcgcgctggctgccggatggaacgattgaatacgccggccgtattgacgaccaggtcaaaatacgcggacaccggattgagcttgaagaaatcgaaaagcagctgcaggaatacccaggtgtgaaagatgcggtcgttgtggcggaccgccatgagtctggcgatgcatcaatcaatgcctaccttgtgaaccgaacgcagctttcagctgaagacgtgaaggcgcacctgaaaaaacagcttcctgcttacatggtgccgcaaacctttaccttcttggatgagcttcctttaacgacgaacgggaaagtcaataaacggctgctcccaaaacctgatcaggatcagctggcggaagaatggattggaccgcggaacgagatggaagaaacaatcgcacaaatatggtctgaggttctcggcagaaagcaaattggcattcatgacgatttctttgcgctcggagggcattccttgaaggccatgaccgccgcgtcccgcatcaagaaagagctcgggattgatcttccagtgaagcttttgtttgaagcgccgacgatcgccggcatttcagcgtatttgaaaaacgggggctctgatggcttgcaggatgtaacgataatgaatcaggatcaggagcagatcattttcgcatttccgccggttctgggctatggccttatgtaccaaaatctgtccagccgcttgccgtcatacaagctatgcgcctttgattttattgaggaggaagaccggcttgaccgctatgcggatttgatccagaagctgcagccggaagggcctttaacattgtttggatattcagcgggatgcagcctggcgtttgaagctgcgaaaaagcttgaggaacaaggccgtattgttcagcggatcatcatggtggattcctataaaaaacaaggtgtcagtgatctggacggacgcacggttgaaagtgatgtcgaagcgttgatgaatgtcaatcgggacaatgaagcgctcaacagcgaagccgtcaaacacggcctcaagcaaaaaacacatgccttttactcatactacgtcaacctgatcagcacaggccaggtgaaagcagatattgatctgttgacttccggcgctgattttgacatgccggaatggcttgcatcatgggaagaagctacaacaggtgtttaccgtgtgaaaagaggcttcggaacacacgcagaaatgctgcagggcgaaacgctagataggaatgcggagattttgctcgaatttcttaatacacaaaccgtaacggtttcataaatgaagtgatgaaaggaggagacagccaatgagccaactcttcaaatcatttgatgcgtcggaaaaaacacagctcatctgttttccgtttgccggcggctattcggcgtcgtttcgccctctccatgcttttttgcagggggagtgcgagatgctcgctgccgagccgccgggacacggcacgaatcaaacgtcagccattgaggatctcgaagagctgacggatttgtacaagcaagaactgaaccttcgccctgatcggccgtttgtgctgttcggacacagtatgggcggaatgatcaccttcaggctggcgcaaaagcttgagcgtgaaggcatctttccgcaggcggttatcatttctgcaatccagccgcctcatattcagcggaagaaagtgtcccacctgcctgatgatcagtttctcgatcatattatccaattaggcggaatgcccgcagagcttgttgaaaataaggaggtcatgtcctttttcctgccttctttccgatcagattaccgggctcttgaacaatttgagctttacgatctggcccagatccagtcgcctgttcatgtctttaacgggcttgatgataaaaaatgcatacgagatgcggaagggtggaagaagtgggcaaaagacatcacattccatcaatttgacggcgggcacatgttcctgctgtcacaaacggaagaagtcgcagaacggatttttgcgatcttgaatcagcatccgatcattcaaccgtgatcaaaagcggacagcttcggctgttccgctttttttgtgttgaatgccaatttctgcatggtataatagtcgaaatactcaaataaaggcaggtcgaaacatgcgcacgtctcccaggatgaaatggtttgtattgctgtttacgtttgttttcgccatcggaatgaactcattcagaaattcctttcaattttttatgctgccaatggcagacgccttccatgccgacaggtcgctgatttcggtttctgtcagcatttttatgatcacaaccggcatcgtccagttttttgtcggtttttttatcgaccgtttcagtgtcagaaaaattatggcgctgggagctgtttgcatcagcgcaagctttttggtgcttccttattcaccgaatgttcatgtgttttccgccatttacggtgtgcttggcggaatcgggtattcctgcgcggtcggcgtgacgacccagtatttcatcagctgttggtttgacacacacaaaggtctggcgcttgctattttgaccaatgccaactctgcgggcctgctgcttctctcgcccatttgggctgcggctccgtatcatgccggctggcagagcacctataccattttgggaatcgtcatggcggctgttctgctgccgctcctcgtctttgggatgaagcacccgccacatgcgcaagcggaaactgtgaaaaaatcttatgattggcgagggttttggaacgtgatgaagcaatcccgcctcattcatatcctgtacttcggcgtgtttacttgcggatttacaatgggaattattgatgctcacctcgtcccgatactgaaggatgcgcatgtctctcatgtcaacggaatgatggccgcgttcggggcatttatcatcattggcggattattggcgggctggctgtcagatctcctcggcagcagaagcgtcatgctatccatcttatttttcattcggctgctcagcctcatttgcctgctcattcccattctcggaattcatcacagcgacctttggtacttcgggtttatcctgttattcgggctcagttacacaggcgtgatcccgctgaccgcggcgtcaatttcggaaagctatcaaacaggattgatcggatcgctgttaggcatcaatttctttatccatcaggttgccggagctctcagcgtgtatgcgggcggtttgttttttgacatgactcatggttatttactgattgtcgctgtgtgcatcgtgtttgtgggtttatcggctgtaatagagctggtgccgtttttagataaacagaaggcaaaagaaacccaccattcaatataaaaggatcagcactgtcaatgctgatcctttttaaatttgagtttttttgtttcggtatttttaaggataatctccttgaatctgttcatctcctcttcggagtgaaaaaaatgtttggggatcgcaatatattggccacttgatgtattgaccctgaagatatttttatattcgaaaacagctgtaatttcatcccaattgaaaatgaggtcatattttttagaacatatacgaattccttcttggttcagagtatatgttcttttggatttcatccgttcgttcttcttgtatgctctggaaaacttcacatatagaagaaggaggagcagcagtgtaaacagaacggacatcacgataatcaacatactgttcataaacaagttaagcgcgtcacttccataaacgatacggggccatccgttaatgaagttaactgcagcaaatatggcgcaaaacaatagaaagtaaaagcatgatatttttgcgatttgataaaaaaagatttctcttacatccttaaaagtgatttctcctggaagattgatactttcactagcatattgaatcatacggtaaacctacacctctaaccatgtttttccttttagtctagcataatttctcatttttttgcaggcataccagggcgctttgtttttttctccagattgatattgctccccaccacgccaatcataatacaaacagccccggcaagatgataccaggccaggctttcgttgagaatcacaaatcctgcaatcatcgtcacaatggtagatacatgattaaaagcgctcattttaaacgcctcaattcgcgacagcgtatagttagacagaaatgaagtgacaagtgaagacagcacgcccaaatacacaatggcgagaacgaagccgggctcccggaacggcagaaaataagtgccgactgttcccgccgctccgtgacgcacaagggcgatggcgttgaagacgacaaagccgatggctgacatgatgtaggtgagctcggtcagcttgaaccgctgcgtcatttttctggcagcagtattgtacatcgctgaagacaaagcggacaataggatcagcaaagacccttttaagctggctgattccacgtcaacgcctttcatcacaaaaataaacatgacgccggcaacggataaaaccgtgaaccccttttgcgtccacgttgggcgttcctttaaaacataagcggcaaagaccatcgtgaaaatcggaatggctgcctgaataattcccgcttcagaggaggacgagtacacaaggccgaatgcctgaaagctgaaaaataacgcgggatacagcagggcgagcggcaaaatgtcaatgacgtcctttacgcggattgatagctttacccagccgaataagatcggtacagtggccgcagcaaacgcaatggtgaaccgatgcgccaaaatatcaaacggctctgctgtttgcagtgcgatttttacgaatagaaaggataaaccgataatgaacgaatataaaatagccgctatataagcgggggtttgctgatgtttaaccataatgggaagggctcctttacctgaattgcagcgccggtcgctccctttattgtatggccgcggtcagaacggtacaatgagaaaaacaatgaactgtaccggtacaaaacagggggagaaggcatggagaaatatatgagtctattaacgaggatagaggagatgatgcaaagcacctcatatcaagaaggagacaggcttccatctatccgtcagctgtccgcccgctaccaagtcagcaaaagcacagtgatccgcgcgctgcaggagctggaaaagcgccaccttatctattctgttccgaaaagcggctattatattgtgaaaaagtcagggaaatcaaaaagcgggcagcctggccccatcgactttgccacatctgcgccggatcccgatgtgtttccgtatcttgattttcagcactgcatcaacaaagcgattgatacatacaaaaacgatttgtttatttatgggacgccaaaggggcttccatcactcatccgcgtactccgaaagctcttggccactcaacaggtatttgcggatgaacggcatattttcattacatcaggtgtccagcaggcgttatccttgctttgtgccatgccgttcccaaatgggaaagagaagatcgccattgaacagccgggctaccatttgatggtcgaacagcttgagacacttgggattcccgccatcggggtgaaacgaacggaagaagggcttgatatagccaaggttgagcggttatttcaaacagaatcgattaaatttttttatacgatgccgcgcttccataacccgcttgggtgctcattgtcagagcgtgataaacaggagcttgtgagactggcagaagcgtatgatgtctatctcgttgaggatgattacctcggtgatctggaggaaaataaaaaggcagatccgctgtacgcatatgatctgtcctcacatgtcatctatttgaaaagcttctcgaaaatgatgttccccggcctccgcgtgggggcggctgttttgcccgaagcgctgactgacacgttctatgcgtacaaaaagctgaacgacatcgactgttcgatgatttctcaagcggcattggagatttacctgaaaagcggtatgtacggcaggcataaggagaaaatcagagattcttataaagagcggtcgctgaggctacatcaagccattcgaactcacaggcagctgggaagcggacgctttacgttctccagcgggcaggcaccctgtatgcacacccatctggtgcttcctcaggatctgcccgcctcaagagtgattcatagactggaaaaacaaggggttctccttgaggcgatagaccgtcattatttatcagattatccgaaagaaaatctattaaaaatcaatatttccaatgtgaaaacggaagatattgagcgcggtgtcaagctgttgatgagccatttataaaagctcttcgtacgagaccattgtgatatcctcggggaaatcagggtgtacggcgcatacagccattttgtagccgggatcgacctcatacgttttgatatagcatggggaatggctgtccggaagctcaatggatacttgtccgtcctggtgcaggcgcactgaaaaggaatcaagcggaagcgataagcctttgccttcctgtttgataaagctttctttcattgaccatagatgataaaaatagtctgtctgctcgtccttgtcttttgctaaaaggtcgctgtactctgtttttgaaaagaagcgcttggcgatctcaaggctgatcggtttcgttttttcgatatctatgccgatcggctgtgaatcaaacgcgcaaatgacccagcgtccggagtgagaaatgttgaaatgagcgtcgggaagatcagggatgcacggcttcccgtattcctgcgtgctaaagcggatatcggatttgtccaactgatactgcctgcttatgactgagcgaacgagcacatctcccagcagggtgcggtgagcatcttctttatgataaaatctccggcatttctcccgtttttcaggtgatatgaaagacatgaaccgttcattttcttcctgtgaaagcgggcggtccatataaattccgtaaatcttcattctagatcctccgtctgcaaaagattgtcaaaaccatcctatcatacttccacaagactcatatagaggagaaaataaaaaaacaaagccaaggcggctttgttttagtgtacaggcggagatgctttcactgcggctgtccgccttgccacagcataattcagcaactggattgactggggcaatgaaaaacgcaaaataagtccggtgaggatggcggtcaaaatggtgccaaaaccgatcggtccgcccatgccccatgccgcaaacaaaatggttaattccatgccgttccgcacccattgcacattccagccggttttttctgtaatcagcatcatcagtgaatcacgcggccccgcgccaaggcctgctgatacataaacaccgacgccgtaaccaatcagcaccacgcctagagagaagacgatgatcgagcctgtgtaggtcgagagggcaggcagaatgaaattgaaaaaatctataaatacaccaatgagcaccatattcaggagggcaccaattttcggccaagctctcgtaaacaatgacgtgaatccgacgatgagcgctccaataatgatggaccactggccgacggtaagcccgaagtgctgaaacaggctgtaatgaaatgcatcccacggactaatgccgagtgcttttccttctatcgtcagggatacaccaaaagccaaaatgatcaaaccggcaaaataaaatgtccagcgcagaacaagttcttgcttcacgtgaggtcccttctttcgtaaaaatcagtcgattgtcattgtagcacatctgacagaagggcggaataggcgaaaggggctcaacaaaaaaacagggccgccggaggcgccctgtttcagcgtgttggcaaacccttgcattcgttgtcaggcctgtgcttcggtgctcacgaatttaacattagctgtgctccaatgctcgcccttcctagacttcaaaggttttcaatcacgctgaaaatcacaaaatcctaaaacgaatatcgttttaggattttgtcaataatctgaaacagggcgctgacgctctgtttttcttattacagcgggttcaaaatccggtttaagaaccgctgtgtccgttcttcttttggtgcggagaaaatttgctccggcggtccctgctccacgataacgccgccgtcgatgaagatgacttcatccgcaacctcctgcgcgaacttgatttcgtgggtcacgacgaccatggtccagccttcattggccaagtccttgataaccttcagcacctctccgacaagctcgggatcaagcgctgaggtcggttcgtcaaacagcatgagctcaggctgtatcgccagtgcgcgggcgatgccgacgcgctgctgctggccgccggaaagctggaacggatataaatccattttgtccttcaatccgactttatcaagaagctgaatcgcttcttttctgacttcctctttgttccgtttttgcacctgaacagggccctccatcacgttttcgagggctgtgcggtgcgggaacaggtgatacgcctgaaacaccattccggattttcggcgaagctttaggatatccgcctgtttcacctttttggagaaatcgatggagaaatcatcaaatgcaagctctccgcgattcgggatctccagagcgttcaggcagcggagcagcgtcgttttccctgaacctgaaggcccaagtatggcgatgacttttcctttttcaatcttcatatctatcttttttaaaatttcattttcaccgaatgatttgtttaatcctttaacggtaagcatactcggaacctccttatttggccacgtagcggtcaagacgccgttcgatgacatgctggacgagtgagagcaggaagcagataatccaataaataaaggctgcttcaatatagatcactaaaatttgatcaagattccgcgcgccgatttcctgggcttttctgaacagctcagcgaccagaatttgagaggcgagggatgtatctttaatcaggctgataaaggtattggataatggcgggatcgacacacgaaacgcctgcggcaaaatgacgcggaacagcgttttttgatgtgtcatgccaattgtgtagccggcttcccattgccctttcggcacggataaaatagatgcccgaatgatttcagatgcataggcgccgacgtttaatgaaaaggcgataactgcgcttggaaatggatctaatgtgacgttaaaggccgggaacagatagaaaatgatgaacaattgaacgagaagaggagtgccgcgtattgcggatacgtatacgctgaacacccatctcaaaggtctcactttcgacattctggcaagcgccgtaatcagcgccaggatcattccgaatataaaggaaagaatcgtaaggggaatcgtatagtagattccccctgaaagtatcggccagaatgactgctgcaccagatcccacgggatcgccgtgccaagcgtcaatgccggcagattatttagaaacatcttcgccgaaccattttttagaaattttagaaagagtcccgtcctctttcatttcttttaatgctttgttgacttgatcaacaacctcgccgcttcctttacggaacgtgaaatatgttgactgaggctcacctgtttcaaacgcgattttcacgtttttattgccagatgtttttaagtagttcaatacggcaagcttatcgttgtatgtcatatcgacgcggccttgctggatcatttgaagggcctgcgccatgccttcaacgccttctactttagcgccggcatttgtagctaatttgttgtagttgcttgtcagtgattgagctgacgtttttccttttacatctgcttcagacttaatatcgttgttgtcttttttcgttacgacaacggctcttgatgttgtgtatttatctgagaaatcatatttgtcttcacgatctgtttttccgacttggttggcaacaacgtcaaaccgtttggaattcaggccggcaaacatactgtcccattgtgtttccttaaagtcgactttaagcccgaggcgttttgcgacttctgtgataacttcgacatcatagccagtcagtttatcagtgtctttgtcgtggtaagtgaacggctcatatgttccttccgttccgactgtgagcacaccttttttcttaattgaagcccaaagatcgccatctttggcattatcttttgactgattgtcatttcctgctccgcaagctgcaagagctgcaatacttacgaccatgaataaagccaataatgcttttttcatcttattccccacttttctggttgattttattgaaataaaaaattagcttacaaatctaaaggataacttttttttagtatgagtcaagtatttggttttcataagacaaaatcttttaaaataaatccaaaaattgctgtgccggtttaggcaaataactgtccgttctccacatgacagccggtgtcataatgaagggattattttcgatatggacggtgtgaacgtgatttctcatatgaacgggaatcattgtgacaggcaaaatagacgcgccgaatccggatgacacgaggctgagcaaagttgcagagtcgtggcattcacaaacaatgcgcggctccaggttcaaacgatgaaattcattcatgacctgattatagacgccttttccgttgacaggccgcagcaggatcagcggaaatgaaggaatgtccaccatcttaatggtgtctccgcacggatatccggcttcatctgaaagcacgagcacacatggaatgtcatcaagctgcttgaattgtactgtgtcacttttgatcagtgttgtcgtgaccgccgcatcgatttgccggctttccagcagttccaacagtgtcgcgggttcattttcccaaatattaaaggtgagatgggggtatctctctttgatctgtgttactttttcaagcatcagagccgcgcaataaatcgttgatcccacggcaagtgtaccggctacttcctccttcagctcctgtacctcaatgactgcatcttcaaacctatgcagaatctcttttgctctttttagaaaaacagctccttcatatgtaagagtcatttgttttttcttgttacggtcaaacagaacaacaccaagttcgtcctccagctgtttgagctgcctgcttaaaggcggctgcgccatgtgaagctttttggctgcggacgtaattttctgttcttgggcaatggtaatgaagtatcgaagctggcgaatatccaaaagaaagcgcctccttatcataccttttaggtattaattatagatttaatagatatttttcatatggatatatcaggagtatgattgaaatgaaagcagaattcaagcgtaaaggagggggcaaagtgaaactcgttgtcggaatgacaggggcaacaggggccattttcggggtcaggctgctgcagtggctgaaggccgccggagtggaaacccatctcgttgtgtctccttgggcaaacgtcacgatcaaacacgaaacaggctatacgttacaagaagtagaacaactggccacatacacttactcacataaggatcaggcggcagccatttcaagcgggtcgtttgataccgatggaatgattgttgcgccgtgcagcatgaaatctctcgcaagcattcgcacaggaatggcggataatctgctgacacgtgcggcggatgtcatgctcaaggagagaaaaaaactcgtcctcttaacgagagagacgcctttgaaccaaattcatctcgaaaatatgctagcgcttacgaaaatgggcaccatcattcttcctccgatgccggcattttataatcggccgagaagcttagaggaaatggttgaccatattgtttttagaacgttggaccaattcggcattcggcttcctgaagcgaagcgctggaatgggattgaaaaacaaaaaggaggagcttgatcatggcttatcaagatttcagagaatttctcgctgcccttgaaaaagaaggacagctgcttacagtgaatgaagaggtaaagccggaaccggatttaggggcctccgcacgggcagccagcaatcttggcgataaaagccctgcgctcttatttaacaacatttacggctatcataacgcgcgaattgcgatgaatgtcatcggctcttggccaaaccatgccatgatgctgggcatgccgaaagacacaccggtaaaagaacagttttttgaattcgcaaagcgttatgaccagtttccgatgccggtcaaacgtgaggaaacagcgccatttcatgaaaatgaaatcacagaagatatcaatttgttcgatatactgcctcttttcagaattaaccagggtgatggaggctactatttagacaaagcatgtgtcatttcccgtgatcttgaggaccctgacaacttcggcaaacaaaatgtcggcatttacagaatgcaagtcaaaggaaaagaccgccttggcattcagcctgtcccgcagcacgatattgcaatccatctgcgccaagctgaagaacgcggcatcaaccttccggtcactattgcgctcggctgtgagccggtcattacaacggcggcatcgactccgcttctctatgatcaatcagaatacgaaatggcaggtgcgattcaaggcgaaccatatcgcatcgtcaaatcaaagctgtctgatcttgatgttccgtggggcgctgaagtggtgcttgaaggtgagattattgccggagagcgcgaatatgaagggccgttcggtgaattcacaggccattattccggcggacgcagcatgccgattatcaaaattaaacgcgtctatcacagaaacaatccgatctttgaacatttatacttaggcatgccttggacagaatgcgattacatgatcggcattaacacatgcgtgccgctttatcagcagttaaaagaagcgtatccgaacgaaattgtggcagtgaacgccatgtacacacacggtttaatcgcgattgtttccacaaaaacccgctatggcggatttgcgaaagcggtcggcatgcgcgcactcacaacgccgcacggactcggctactgcaaaatggtcatagtcgttgatgaggatgtcgatccattcaaccttccgcaggtcatgtgggcgctttcgaccaaaatgcatccgaaacatgatgcggtcatcattccggacttatctgtcctgccgcttgatccgggatccaatccatcaggaatcactcacaaaatgattctcgacgccactacaccggttgcgccggaaacaagaggccattattcacagccgcttgattctccgctaacaacgaaagaatgggaacaaaaactaatggacttaatgaataaataaggaaaggatgttcgaaatgcatacatgtcctcgatgcgactcaaaaaagggagaagtcatgagcaaatcgcctgtagaaggcgcatgggaagtttatcagtgccaaacatgcttttttacatggagatcctgtgaaccggaaagcattacaaatcccgaaaaatacaatccagcgtttaaaattgatccaaaggaaacagaaacagcaattgaagttccggcggtgccggaacgaaaggcttgatccgcgtgaactgtatgtcagaccgtctctttgagctgcttgacgggagctgcctgaatgagaagcagcatgaggccttcgttctgcaaacagtatcagaggatggctggccgcatgccgctatgatcagtgcaggtgaaatcatcgcgctgagccgaactgatatccgaatcgctctgtggaaaaacacaatgacttcggccaacatccttcgcacaggaaaagcacagttcacggcgtggtggaagggagcggcctattatgtaaagcttgaatgcgcgcctttaccgcctttgaaagatgccgaatatgaaagagaccgtttttcctgccgcatcgtttcagtgaaagaggacgttgcgaaatacgctgatttgacttcaggtgtccgtatacagcttcacagccctgaagaggtgctgagcagatggaaaaagaccctggaagatttaaaacggtaatatcgatagcctgacgccatgcgtcaggctttttttatataatgaaaacaaaagggggcgtgagaaatggaacgtgcggggatctgtcactcggacggctttgatttagcttatcgaattgagggcgagggcgcacccatccttgtgatcgggagtgcggtttactatccgcgccttttttcctcagatatcaaacagaaatatcaatgggtctttgtcgaccataggggatttgctaagcctaagcgggagcttcgtgcggaggattcgaggcttgatgctgtcttggctgatatcgaaaggatgagaacatttcttcagcttgaggatgttactatcctgggacattccgggcacgcttttatggctttagagtatgccaggacatatcccaaacaagttcggaaggtggcgctctttaatactgcgcctgataacagtgaagaaagacagcgaaaaagcgaatcatttttcatggaaacagccagtcttgagagaaagaaacgctttgaaaaagacatcgagaatttgccgcaggacatcgacaaagatcctgaaaggcgctttgtgcacatgtgtattcgcgctgaagcgaaaagcttttatcaagagcggccgcatgctgctgccttatgggacggtgtattcacgaatatgccgatcattgatgaattatggggcaatacatttgcccggattgatcttcttcagcggttagctgatgttcgtatgccggtgtatatcggattagggagatatgattatttggttgcgcccgtttcgctatgggatgctgttgacggtttatatccccatgttgataaggttatttttgaaaagagcggccatcagccgatgctggaagaaccggaagcctttgatcaaagcttcaggaaatggcttgatcaataaaaaacagcccgcagatcaacatccgcgggctgtttctgattataagacccctttcatcgcgcgtttgatcaccggcgagagcagcaggagaatgccgccaagaacgatagaaatcaaaccgatggtgccgaagtacattgtttcaggaattttatcaaacaatccggctacttgggcattgatcgcttgggctgctgcgttcgtcagaaaccacatactcattgtctgtgcagagaaggcagctggtgccagtttcgttgtcacggataaaccgactggagacaggcacagctctccaagcacgacaagcaggaagctgagaacgagccaaagcgggcttacgagtgcttcttttccttgcatagcagggaataccataatgataaatgacaatccggctaaaataattccgattgagaatttaactggtgtagacggctgacgtttgccaagcttcatccagagccatgcgaatattggcgcaaaaatgacaacaaacaatggatttaatgattggaaccatgatgactgaagttcgaatccgcccaatgaaagtcttatgcgttcatcagcgtataccgcaagaatggtcgctccctgttcctgaatggcccagaacatgacagcaccgataaacaaaggaacgtaagcggcaagacgggatttttctgttttgtccgcttttttgcttgtaaacatgatgatgaaataaatcacaggaatcaaaataccgagaatacttacaaggtcaatgaaacgtttgatcgtcagcacgcctgtttgtacagagataatcactgcgatcgccacaatgataacaccgattccggtgccaattgcagattttttagacagcggattcggcacattggaacctgcaagcccgaggtttttctttcttgtcaaagcaaatacgataagtccgagaagcattccgaccgcggcagctccgaatccgagatgatagttgtacttctgtccgagtgttccgacaattaacggcgcgagtaaaccaccgaggttaatccccatgtagaaaatactgaaacctgagtcgcggcgcgggtcttctttcgtgtaaagatccccaactacgcttgaaacgtttggttttaataagcctgttccgacaatgataagcaccatactgatatagaatgctatcgaactgcccggataggcgagtgcaatgtggccgaacataatgaatatgccgccgtaaaacacggtgtttgcggtaccgaatacccggtcagcgagccatccgccaataatggtggacatgtatacgagtgatccgtaaatcgacataatggcaaccgcagtgcccttgtcaaagccgagccctccgtttaccgtctctgtatacaaatagtaaagtaagattgctctcattccatagtaagagaaacgctcccaaaattcggtgaaaaatagtgtaaatagtcctcgcgggtgaccaaagaaccctttttgcgggacgcttttaatgatactttcgttatcaatcgaagccatgtcagccaaaccctttctaaaaaaagtgtattataaaaatcatattcttatataatacttgtgtcaatataatttatactcatttcaaatagttccatattggaaaaattataaatacctaaaaatagtgatttcctcctaatttttaaactttttatcgtgagattttcttacacaactattcctttatatttttttaataaaattttagagaaatgtacaagcagatcgggcctttgtgagtaacatgatagtaatcatagagaaggaggctcgcaattggctgaattcatattaaatgcagcggatttcggtgttcctagagatggtaaaacggattcgacagaacggattaatcagtgcctcagtacagctgtttcgaaaggctatcatactgtctggtttccaaagggaacatatttaatagacgcaacgcttggcggagatcttaatcagaggtttcgaaacgcggggatcattgttcccggcaaccttgagattatgatggaccccgaatgtatcatgaaagtgataccgaatagttcgtggggttattccgcattttatgtaggcaagcaagagaatataactatttccggaggacaaattatcggcgaacgggatgagcatacgtatgcctcggcggggataaggtcaacccatgaatggggctttggcatatgtattgaaggatgctcgaatgttgtcattgatgatgtgaaaatttccgattttaccggcgatgggatcatagtcagcccaaggggattaaagaccaatcaagattatcgaacgtcagagcaaattatcatccgccgctgtgaggttcggcggtcgaggagaaataacatttccattaccggatgtgacatggtcacggtggaggaatgcttgattgaagatgccggaacggggaatggaacagcgccgaaattcggaattgacattgaaggatatggcgaaggtgacgttgattatgaggaaccgattaatgtatcaattcgcaataaccactttgttggaaacgtttcaagttctgtgaccaattttaacgggtatggcattttaatagaaggaaatcactcagacaatacaatcagctacggatatgggacgcaaacagtgatcaagggcaatattctgagacgccctgaagacgcggcggctgcgccaagagtcgggataaccggactcggtgtatcacaaggaaaagagaccagtgatgcagtgatcgctggcaacctcattaccggattttcaactggaattgatgtcaggggaaagagcgttcttgtgacgaacaacaaaatcagcaactttgaaaacacagggatattggtttatcagtcctccgacgtaaaggtagacggaaaccaaattcaaaacggactgtctgaaacaaggcgcagcatcggtcttcgcgcagtgctgtcagatgacatcgcatttctgaataactgtctcattcaagtcgttgacggtgtgaacgtttccggcggaaatatgatcattaaagataatctcctgagaaaattcagccggggcatttggattgctcaagggaacgcggtgattgaagggaatacactgaatcctgacgcgtttgaagcagtgccggaatcatattctgtttccgtcacaaacaatgccggcgccatcatcaaaaacaatacatttaaagagttcaaaaattaccccatttattgctccacaagtgcaaaaacctcaattatcggcaaccacttagagcgatccccgcttttggtcaccatctatatcagcgcaggtgtgcatgagatttttgataataccatttcagtcaacagaacagccgggaatccgattgtgatttatctcaatggctctgcaggctctatcatctctggaaacaccatcaataacctctccgcgggcactgcgacagctattcaaacaaacacgtcaaccaattccaaaatcatcggcaaccgcatttttaaagggaccatcaacaaacacagcagtgatacaatagacggcaatatgattgtctgaaaaaagcgcccccctttaggggttcttttttttcgatttatagatcacgtacatttctctcacaagtactaacacaaaaaataaaagcacgacccattccgcaaatgttgtcatcttaaagctggacatattgttataaacggcttttgttaaactgaacccttgaagcatgtccatcaacacagaaatagctaataaacaaattaatatgaatccggtcacgcccaatatcttcatgcttcatcatcctccgcttttagtgtctatctttggcggagaagttataccgcatctaaccctaatgcataatctcaattttaaaaggaagaatatgagaaaacgacaaggaaaggtatttgtgtatgcctttattttctaagcgaaagaacaataccgattcaaaagacaagcagaatacagacgaaaggaatcaggaacagcagcaagaaaaagaaaggccggttctcatttctccaagtttagcaaagaatatagcggaaacgaaaaaggaagtcggaagcagctctgacgtcatcattcgcgagattaaaatcggggagcaggatcatgtccacctagctgttatctatatttctgggctggtcgataataacacgatccatgagtcgttaattgacccattggtacaggatgagtctatccagaatactcatgcgatccagcaaattcttgaaaaaacgctcccgctgggcggggtgaaagcggaaaagagctgggacaagcttttttccgagttaatgcttggcaatgcgctcatttttgctgatggccatgatgaagctttgatttgcagcactcaagggggagagcagcgctccatccaagagccgagcacccaggtgtcattccgcggcccgcgccaagggtttacagagtctctgcaaaccaatatttccatgatccggcgatacattaaaaatccgaatttatgggttgaaaaaatgaaaaaaggttctgttacgaatacggatatcgctctcatgtacattcaaggaatatgtgatgaaaaggtgctgaaggaagtgaaacagcgcctggaaaaaatagatattgacagtattttggaatctggatatattgagcagctgattgaagatgaaacctttacgacgtttccgactatgtatcatacagaacgccctgatgttgtagcgggtaatctgttagaaggaagattcgcgattattgtggacggaacaccgtttgtgcttattgccccagccttatttgtccagttttttcagtctgttgaggattattattcgcgttttgacattgcgacaagcataagaattcttcgtgttttagtctttttcatttcgcttgtggcaccagctgtatacgtggcagccacgacgtttcatcaagaaatgataccgactcagctgttagtggtcattgcggcccagcgggaaattgtcccgtttccggctgttgtggaggcgctgacgatggaggttgcttttgagattctgagggaagcgggagtcaggctgccccgggttgtcggctcggcagtgtcaatcgtaggcgcgctcgtaatcggccaggctgccgtacaggctggtatcgtctctccggcaatggtgattatcgtggcactcaccgcgattgcgagcttcgcaacaccggcgtttgcaatggcgatttcagcccggcttattcggtttatctttattattgcctcagctgttatgggtttttacgggctgattttagggatcattatgatgtttgtccacttatgcagtcttcgttcattcggcgttccatatatgtcgccgcttgcacctttttcttcacaaggcgtaaaggacgcgcttttccgggttccgtggtgggccgatgaaaaaaggccggaatcggtcagcaaggaagataaggtgcggcaggggaaagatcaacgcccagagccggccgcttcacgaggaatggtgaacaaagatttggaagaaggggatcagaatggtacgtaaatgtctattagccgttctcatgcttttgagcgtcattgtgctgcccggctgctgggataagcgggagctgacggatcttgcgattatctcggcgattggcatcgatcggacaaacgacagcaactacgtgctgcatcttcaaattatcaatccaggaaatgttgccggcggccttcagggaggcggtgctggagacaggccgcctgtatctgtctattcgattgaaggtaacaatataacggaagcactcagaaaagcctccatgaaggtatcacggcggctttattttgcccataccaatctagtcgtgatcaatgaaaagctggcaaaagaagaaggtttggattttgtattagataatcttgaccgggacacagaattcaggacaacagcaacattcgtcgttgcccataaaacaaaagcagaaaatattgtgaaaatcttgacgccgattgataaaattccgtcaaataaagtcaataaaacactcgatttcacggaggcacaatacgggcgggtggtcaaaatcaatattcaggacgttttgaaaacacttgccgccaacactatggcaccggtcatccccggatatatgatgattggtgacgataaaaaaggagtcagcatggaaaacacgcaggcgactgacccgaaagccattcttcaggcagatggtttggcggtttttgataaggcaggatatttaaagtattggctggaagatgatgaaagcgtgggggcagtctggcttatgaataagatccagcatacgtttattaatgctgactggggcaagacgaaggatgcggtcagcttgcaggttacccatcaagatacaaagctggtaccgaaaatgcggaacggacgcccgtacatccatgtgaaagtgtcggttgaaggtattatagatgctgtcaaataccctttccaattgtctgatcccaaggtgctggccgctattgaaaaagcgctcaacaaagagcttgaaaaggaaatcagccatactgtgaaaaagattaagaagaataaaatagattttatcggttttggtgacacgatatatagaaagtatccggagcagtgggagaaaatgaaggacacttgggacaaagaatatttgccggaactgcccatcgatgtgaaggccgagacgtatatcagaaggacgggattgcgaaacaatccgatcaaacaccagtttaaagatgattaggtctgaagaaaggggaagtgacagatggaaaaagccagaataagcataaggcagttgtttgtcatgattatcatttttgaactgggcagctccttattgattacaccgggatcaatggcgggcagggatgcttggatagcagttttattaggctgtgcgatcggactgtttcttttctatttgtatcaaggcatttatcaatgttatccgaattcttctccgaaagaatatatggatgatatgctgggaaccaagctgagctggctgttttcatttctctatatcttgtactttgcctatattgccgcaagggtgctgcgtgactttggagaaatgctgctgacgtttgcttatcatgatacacctatcattattgtaaatgctttattaatggtagtaagcatatatgccgtaagaaaaggaattgaagtactcgcacgcgcggccgaacttcttttcggggccatgtatttactgggcgcgatcggccttgtgctgattattgtctcagggactatagacccgcacaatttaaagccggttttggcaaacggcatttctcctgtccttcactctgttttcacacagaccatgtacgttccatttggtgaagttgttttatttgtgatgattttccctaacctgaatgacagaaaagatgtgaaaaaaatggggatgatcgccatggctattagcggattgattgtggcgctcaccgtggcgattaatattagcgtgcttgatgttgatcttacactcagatcccagtttccgcttttaagcacgatccagacaatcaaggtcgaagaatttttagaccggctcgatgtcttttttatgctggcgctgatcatcggcggcttctttaaggtcagcctctacttatatgccactgtggttgggacatctacgctctttaaggaaaagaacccctctcaattggcttatccgatgggattgggcatcttaatcctttctataacgatcgcgactaacttttcggagcacttgaatgaaggcctgaacgtggtgccgctgtatattcatttgccttttcaattattgtttccgctctttctgtttattgtggccgtttggaaaaagaaacgaagagagaagtcaaaaggggaggaagcaaaaaaatgataaaaagagcggggggatgcggccgccgctctttttatgttcacttctatataaaagggggatatagggtgcgcccctgtctgcactggcagaggcgcgttttgttatacgactgcgacgttttccttcacagtaaaacttcctcttgaaagtctgatattgatgtctgacacttttgcaatttgttcatcgtgcgtcaccataatgacgcatttatcttccttgtgcgccagatcctgaaagagccgtacgatctcttttgatgtgtcctcatcaaggtttccggtcggttcatcggctacgataagatccgtgtcacagcagaaagcccttgtaattgatacccgctgctgctgtccgccgctcagtgtgagcactttttgccgggcttgtttttcgttgatgccaaccttctgcagcatgtcaagcgcatatgattctttgttcttttctttagaacctgtgatttccatagcggttgtgacgttctgcaaagccgtcatatacgggagcaggttgtacgcctgaaagacgattgatacatattgatttctgaaattggttaagccgattttagaaaccgcttttccgtcgtaaaggatgtttccttcttttggtgcgtcaagtccgcctgccagagacaggaaagtggttttccccgtccctgatgttccgacgattgtgtagaattttcctttttgaaagctgatgttaatatcctgaaacaatggctggcttttgtttttataccagtagccgacttgttgaaattgtaataagctcataggttccgcctctttctattcctgttttgtcaatatcgttttcggatgaagccgcagtactgaaattgacggcagcaatgttgcaatgattgcgattaggatgccgatcccgccaagtataagcatgtcgttcatagaaaccgcgacgttcagtgaatcgataacgtccacgttggatgaactgtggccgaacattttgccgcccatgccgccaccgccgccgggcatttgtccgcttgcggtttgcgttgaatcggttgatgaactgatttgctgggataaaagctgatttccaagctgattcgcgacgagatttcccgtcacagatgcaaggccgatagcgataacggccacaatcagaatctcagtcaagaactgtccaatcaatttccatcgtttttcaccgatggccattaacacgcccatttcgtatttgcgctccctgattgacatcatgacaatcaggccaagaatgacggcgcctgccactgatacaagatacaccacgtttttagagaaagaagccacattttcaatcggtccgaccatttgctggtaaagctgatcgtttgtattcagtgtgtacgtatcaaagtcaattgatgttttcttcgctgcttttacgaaagtatccatatttttcgcgtcgtccatatagtaaacagctgagtcaatcgtatttttatagtcgtcgcctttcaatgccgctgttgctgtgtaaggcgtataaagcttgttataaggatttaagaaagagaaattttgggcttggtcatcacctgaagatgttgttttataaataccgacgatcttcagttttactgttgtatcctcatccgttgctgattcaattgtgatcgaatcgccaacgcttaaatcattttcttccgctaatgtttcgttgatcactgttacttttttgccgacatctgattttgtaatcgcgcgtccgtctgtgatttttgaatctccgtcagagaaatcatcgactaacgctgtgctgatgacaccttcaatagaaagatcagcttgaaccatttgcggtccgccttgtcctccgccttgactgtttttagcgtttgagcttgaactgctggagctggaatcacttgaactagagctttcaatcgcatcaaagtttcccgcgttggctgaagctgatgtggtgtaattgtagctcttcacatgatcaagcgctgcaagcttattcgcatcagacactttgatcggtgtggattcgaagctgcgcttttcaccgctgtcctgctgtttttccatttgcttttggcggtcaacctgaagtgtcacgcttccaccgagttcctgtctggccagttcgcttgacttttgtgctgccgactggatggcgaggcctgatagaacaaagacacatatgactgtaaacacaaataattgcaataacgtttttccctttttagccttcatattccaaaaggcccgtttgataaagttcatttatgttcctccgtataggtatttttattgataagaccgcctctggggcgcgtccccttgctgataaattaatagtagtccaaaggtatgaaaaaaatatgaacaatctatttctagttgatgaaataaaaactaacaattgtgaaacgcaaaaccttctgtttaaaatggtgctattatataaaaaagcatcaaaacaaccggaggatataatgaaaatattaatgatagaagataatgttagtgtatgtacgatgacggagatgttcttttttaaagaaggttttgaagccgaattcgttcatgacgggttagaagggtaccagcgttttacggaagaaaattgggatctaatcattttggatatcatgcttccatctatggacggcgtgaccatctgcagaaaaataagagagacaagcacggtgccgattatcatgctgactgccaaagacactgaatcagatcaggtcatcggttttgagatgggggcggacgattatgtcacaaagccgttcagcccgctgacattggttgcccgcatcaaagccgtcatcagaagatataaggcgacaggcaaagcggttattgatgaagatatgattgaaacggaatgctttaccattaataagaagacgagagaagtattattaaacggagagcctgtagaaaatctcacgccgaaggaattcgatctgctttattaccttgtccaaaatccgcggcaggtgttctccagagaacagctgcttgagcaggtatggggctatcaattttatggagatgagcgaacggttgacgttcatatcaaacggctgcggaaaaagcttgccagcgaggacaagcctttcctgtatactgtgtggggagtagggtataaatttgatgaagattaaatatttatatcagctgctgctaagccatatcagcattttgattttagcgtttgtcattatcatttctctgttttcccactttgtgaaggaatttgcctatcagaacaaagtagaggaattgacgtcatatgcggtgcagattgcaaatgaattccaatccggccaggtggacatgcgcaggctctatccttatcaggacattttaagcacaagaaagacgcaatttatcatctttaatgaagagcagcagccttattttcttcctgaaggctttcatcacccaccaagggaacagctgaagaaatcagaatggaataagctgaaaaaagggcagactgtcacgatcagggcagatggccgttttgatgatgaagtgtcccttgtggcgcagcctatatttgttcagaacgaatttaaaggcgccgttctgctgatttctccgatcagcggtgttgaacagatggtcaatcaggtcaacctctatatgttttacgctgtgatcagcacgcttgtgattacgattcttgtgagctggcttctgtccaaattccatgtcaagcggattcaaaagctgagagaagcgacagataaagtggcttccggcgattatgacatccatttggaaaacagctacggggacgaaatcggcgtactggcgtctgactttaatatcatggcgaaaaaactaaagcagtcaagggatgaaatcgagcgccttgagaagcggagaaggcagtttatcgctgacgtgtcacatgaattaaaaacaccgctgacgacgatcaacggtttggttgaagggttgaacagccatacgattcctgaggataaaaaggataaatgcttctcgctgatcagtgaggaaacgaagcgcatgctgcggctcgtaaaagaaaatctggattatgaaaaaatcagatcccagcaaattaccttgaacaagctagacgttcctctgatcgaggtgtttgaaatcgtgaaagagcacttgcagcagcaggcggaagaaaaacaaaacaagctgatgatccaagtagaggatcacgtcatcgtacatgccgattatgaccggttcattcaaattctcgtcaacattacgaaaaacagcatccaatttacgcaaaacggtgacatttggctgcgcggaatggaaggttataaagagacgattattgaaattgaagacacgggtatcggcattccaaaagaggatattgagcatatttgggagcgattctataaagcagatatttcaagaacgaacacagcatacggtgaatacggactcggtctctcgatcgtcaggcagctcgttgaaatgcaccagggcacagtagaaatcaagagtgaagaagggaaaggcacaaagttcatcatccgccttcctttaacggcaaaacagcaatagcatacagggcggcgcatcaactgatgcatccgccttttttgcacaccgcttcggtttattgcgtgctcccgaaaacaaagattgcgtgtttttcgggttgggacggcctataaacatgataaaatatgacataaacagtttttgatgggagagggtgaaggaatgaagagtggggtaattccttcttcagcggtcggtcaaaaaattaacgagtggtacagatatatccggacattcagcgtgccggatgccgaagtgttaaaagctgaaatccagcaggaactgaaacacatgcagcatgattccaacttgctgctttattattcactaatggaattccggcaccagcttatgctggattatcttgagccgttagagaaattaaatatcgaagaccagccaagcctgtctgaattatcaagaaacattgacagcaaccaggcagatctcaaagggctgctcgactattacgtgaatttttttcgcgggatgtatgaatttgataagcgggaatttatttctgccattacatactataaacaggcggagaaaaagctctcctttgtcgcagaccatattgaacgggctgaattctattttaaaatcgcggaagcttattattatatgaagcaaacgtatttttcattgattaatataaaaaacgcctatgaaatttacgtggagcaggaaacctataatgtgagaatcattcagtgccatttcgtcttcggggtcaacctgatggatgaaagaaatttcgaacaagccgcacgccatttcaaattggcgctcaacatggcccaagcagaacaaaaagcccagctggttggaagagcatactacaatctcgggttatgctattacaatcaagaccttctagaccctgccattgattactttgaaaaagcggtctccacatttgaaagcagcaggatcgtcaattctctcccgcaagcctattttttaatcaccctgatttattataaacagggaaaacatgataaagcttcggaatatcacaagcggggctatgaatatgctaaagaaacagacgatgcagactatgccgtaaaattcgagtttttgcaatccctatatctggatcagcccaatgaagaaggaatcgaacgatgtttccagtacttaaaaaataaaaatatgtacgctgatatagaggatttagccctagaagtagcaaaatattactatgaacagaaatggtttaaactgtctgcttcctactttctacaagttgaagaggcaagaaaacaaatacaaaggagtgaaggtttgtatgaaattgaaatctaagttgtttgttatttgtttggccgcagccgcgatttttacagcggctggcgtttctgctaatgcggaagcactcgactttcatgtgacagaaagaggaatgacgtaagaacaagccccttctcattagcgagaaggggtttttcttttcaaaaaaacaccgcaagacatagtcttgcggtgccgccttcatggagattacgtttatttagtagcctcctacaaatgcagttcccacaatgatcaagaggataaataacacaacaatcaaagcgaaagaagttccgtaacctgacattttgtgcacctccttgcgagattgcttcagcaaatgctgcaaaactgtggcggacagggtcccgcagagacggtcagcagcttagaagccgccaacaaacgcagtccctacgataattaatagaataaacaatacaacgattaaagcgaaagaactgatgccgccgtaaccgccgccgttagagtatcctgacataaggtttcacctccctatgaaggatactataagatatgctgaaccgatccatttggcagggataatagtggacaagagaaaaaatgaagaattcggctatatgaaggtgatataaaaaaatagcgggcgctgccgcccgctatttatgtacgattaagagatcagcacgcccgcgaaaaattcctggtataacgcttgaacggcttttctttcttcggcttcttttacgccaaacatcatgctcacttcagaagacccctgattgatcatttcgatattcacctgtgcctctgataatgctttggcggctcttgccgttgtaccgacattgtggcgcatcgcttcccctacaaccataatcagggcgagatgatgctcgacgatgacttcatcggcatgcaaatcctcttcgatccgtttgatgacgctgcgttcagtggcggcatccatttgcccctgccgtaaaatgattgtcatgtcatcgattcccgatggaacatgctcatacgtcaaaccatgctcctccaggatttgaagggctctgcggccaaaaccgatttctctgttcatgagatacttgctgatataaatgctgcaaaaaccggtgtcgctggcaatgccgacgacaggcccgtttgtgttatcccgcttgctgacgacgcgggtgccttcggctgaggggttgttcgtatttttgatctgaacaggaatccccgctctgaatgccggaatgagcgcttcatcatgaaacactgaaaaacccgcgtaggacagctcccgcatctctctatatgtcagctcgctgatttcctttggattctcaacgaaggacggattgacagaatacacagcgtctacgtctgtaaagttttcgtacaaatcggcttgtagtccgttggcaagaatcgaaccggtaatatcagaaccgctccgtgagaatgtgatcacatcgccatccttgctgaatccgaaaaaaccgggaaaaatgatgagtccgtcacgttcccgaagacgatagaggttttgataggattcaggaagaacttgcgcgttgccgggttcatttgtcacaaagaggccggcatccttcgggtttacatattccgctttgacgcctttataacggaagtaagcggcgatcagtttggcattgttatcctctccgctggccttgactgcgtcaaggtattgttcgggattgcttttgtctccttctaaaagcgtaaacagatcatctctgattttttcgataatgctttgccccagctgaagctcattggcgatgagagcgtaccgttccacaacagcttccgccagttcaggtgcgctgcctgttgccaaatattgttctgcacatgcgattaagagatcagtcactttcgtatcctcggcatagcgttttcccggagctgaaacgactacagctttccgtgccggatctgaggtaacgatgtgaaacaccttgtcaagctgggcgcctgaagcaagtgagctgcctccgaatttaacgaccttcatgtttacatctcctaatgtttaaaattttcacacaaatttagtatttattatctctctttcagtactgtaaatcaagggggaatttctttctcaggagaacatttgtatttttcacgaggaataatgttaggtttgctgaccgtatgcctgcgttataaagataaatatggtaaacagcctaacgttttgggatggaaaatggttagaatgattagtaaaattgataaatgactaggttaatatttttaaagaatattgactaaccctataaaaatggtaatatgtaaatgataatgataatcaattactatatggccatattgttttgagtccttgcggagtaggagatacgttctttttgctgtaaggatgtaaggaggcagcatgaagctacgttacttatttattctacttatcatattagcagtcacatctgtatttatcggtgtagaagatctgtcgccgcttgatctcttcgatttaagcaaacaagaggcgtcaacgctgtttgcaagccgtttgccgcgattgatcagcattgtcattgcgggattaagcatgagcatctgcggtttgattatgcagcagatcagcagaaataaattcgtgtcaccgacgacggcgggcacgatggattgggcgaggctcggcattttaatttccttgctgctgtttacatccgccagtcctttaatcaaaatgctggtcgcgtttgtctttgcccttgcaggaaattttctgtttatgaaaatccttgaaagaatcaagtttaacgacaccatctttattccgcttgtcggtttaatgctcgggaatatcgtcagttcaatcgcgacatttatcgcatataaatatgacttgatccagaatgtgtcatcatggctgcagggagacttctctttagtcgtgaaaggaagatacgagcttctttatctgagtattccgctcgtcatcattgcctatgtgtatgcggataaattcacattggccggtatgggtgaaagcttttctgtcaacctcggcctcaagtataaacgggttgtgaacatcgggctcattatcgtgtccctgatcacgtctcttgtcattttgactgtcggtatgctgccgtttctcggtttaatcatcccgaatattgtatcgatttacagaggagacaatctgaagagcagcctgccgcatactgtgctgttgggagcggtttttgtgctgttttgcgatatactgggcagaatcattatcttcccttatgaaatctcgattggcctgatggtcggaatcatcggcagcggcattttcctgtttatgctgttaaggagaaaagcctatgcgtaaccagatgaaaatagctttgctcgttggtttagccattgtatgtattggcttgtttttgttttatgacttaggcaattgggattacaccctgccgagacgaatcaaaaaagtcgctgccattgtgctgactgggggagcgattgcgttttcgaccatgatctttcaaacgattacgaacaaccgcatcctgacgccgagcattttgggccttgattctctctacatgctgattcagactggcattatctttttgttcggttctgcgaatatggtcatcatgaataaaaacatcaactttatcatctctgttctgctgatgatcctgttttctcttgttttgtatcagatcatgttcaagggtgaggggagaaatatctttttccttctgcttatcggaatcgtgtttggcacgctgttcagcagcctgtcttcttttatgcagatgctgattgatccgaacgagttccaagttgtgcaggacaagatgtttgccagctttaacaatatcaatacggatttgttatggctcgcgttcatcatcttcctgctgacaggcgtttatgtctggcgttttacaaaatttttcgatgtgctgtcgctcggacgcgagcacgccgtgaatttgggcattgactacgacaaagtggtgaagcagatgctgatcgtggttgcgattttggtttctgtttcaacagcgctagtcgggccgattatgtttttaggccttctggtcgtcaacctggcgagagaattcctgaaaacatataagcattcatacttaatcgcaggctccgttttcatcagcatcattgcgctggtcggagggcagtttgtggttgagaaagtgtttaccttctcaacgacgctgagcgtcattattaattttgccggcgggatttattttatctacttgctgttaaaggagaataaatcatggtagaggtcagaaatgtaagcaaacaatatggcgggaaagttgttcttgaagagacgtcagtcacgattcaaaagggcaaaatcacctcgtttatcggtcctaacggcgccggcaaaagtacgctgctgtctatcatgagccgcctgatcaaaaaggattccggcgagatttacatagacggacaagagattggagcatgtgacagcaaagagcttgccaagaaaatgagcattttgaagcaggcgaaccaaatcaatatcaggctcacgatcaaagacctcgtcagttttggcaggtttccgtactcacagggccggctgacagaggaagactgggttcatatcaaccaggcgcttagctatatgaagctggaagacattcaagacaaatacttggatcagctgagcggcggacagtgccaaagggcatttatcgccatggtcattgcccaggacacagattatatctttctggatgaaccgctgaacaatctggatatgaaacactcagttgaaattatgaaactgctgaaacggctggtagaggagcttggaaaaacgatcgtgatcgtcattcacgatatcaattttgcttcagtctattctgactatatcgtcgctttgaaaaacggccgaatcgttaaagaaggaccgcctgaagaaatgatagaaacatcagtgcttgaggaaatctacgatatgaccatcccgattcagacgattgataatcaaagaataggtgtttatttttcttaatatatagaagaggtgaggagcatgaaaaagttcgcgttactattcatcgctttggtcactgccgttgtcatttctgcatgcggaaaccaaagcacaagcagcaaaggttctgatacaaagaaagaacaaatcacagtgaaacaccagctcgacaaaaacggcacaaaagtaccgaagaaccctaaaaaagttgtcgtatttgactttggaagcttagatacattagataaactaggacttgatgatatagtagcgggcctgccgaaacaagtccttcctaaatatctgtccaaattcaaggatgacaaatacgctgatgtcggcagcttaaaagagccagacttcgacaaagtggcagaattagatcctgatctgatcattatttcagcaagacaatctgagtcttacaaagaattctctaaaattgcgccgacgatttaccttggtgtagatacagcgaagtacatggaatcatttaaatcagacgctgaaacaatcggtaaaatctttgataaagaagacaaagtgaaagatgagctcgcaaacattgatcactcaatcgcagatgtaaagaaaaccgctgaaaagcttaacaaaaacggtctcgtcatcatggcgaacgatggaaaaatcagcgcgttcggccctaaatcaagatacggcctgatccatgacgtattcggcgtggctccggctgatcaaaacatcaaagcgtctacgcacggacaaagtgtttcttacgagtacatttcaaaaacaaaccctgattacttgtttgttattgaccgcggtacagcaatcggagaaacatcatctacaaaacaagtcgtggaaaacgattatgtgaaaaacgtaaacgcagtgaaaaatggtcatgtcatctaccttgattctgctacttggtatttatcaggaggcggacttgagtctatgacgcaaatgattaaagaagtgaaagacggtttagaaaagtaaaaccaaaaagagcctccgctaaatagcggggctctttttttgttaatcagcgtgccggctgctgttcggcagggcgctgaggtttctttaatgtgaatgagagaaggaagccgacaagtgcaatgacggcagccactataaaagcggcgttcatgccgtgcagggcggcgtgcttcacatttgtcgtgcctgcatgtgccgcctggttgctcatcacggaaaccaatagtgcggttccgatcgagccgccgacttggcgaatcgtgttgttcatcgcagttccgtgcggaatcaagtggcgcggcagcgcattgattccggctgttgtcaccggcatcatgatcatggcggtgcctaagagacgaacggtgtataaaacgacaatccaagcgagtgacgtatggtcagtcagctgcataaacggcagagatgtcaggaagatgatgcagaaaccggcaatcgccagccctcttccgccgacacggtcaaaaattctgccgataatcggcgacataaagcccatcacaacggctcccggcaggagcataagccctgtatcaaaagctgtgacgtctctgacattttgtgtataaagcggcaggatggtttccgtaccgatcaataatgcaaagacgagggttcccagcagtgttgttaagctgaaaacgccaaacgtgaagacgcggaattccagcatcggttttttaagcttcatttgtcttgtgataaacaagagcagcgcgatgacacccaccagcagtgaaatcaagacggttgaactggaccagccataagagccgacgcttgagaagccgtacagaaggccgccgaacccaaatgttgaaaggatgactgataaaatatcaatctgtgtttttcttaaagtcgtcacgtttttcatcaggatgctggcaagaatcaaatcaatcacagcaaacggaagaataatataaaacaatgatctccaagagaaagcttcgacagcccatccggaaagagtcggtccgatcgcaggcgcgaatgagatgaccaatccgaccatacccatagcctggccgcgcttttcaatcggaaagattgtcaggaatacagtctgcatgagcggcatcataatgccggctccagccgcttgaatgatacgcgctgtcagcagaaccgggaagttcggcgcgaacgctccgacgactgttccggcagtgaaaatgctcattgctgtgatgagcagcgcccggcttgtgaatttctcaattaaaaacgcggtaatcggaattaaaatcccgttggttaacataaatgatgttgtcagccattgtgcttggttggcatcgacattgaaatccctcatgatatggggaagtgcagtaatcaacaatgtctggttcaaaatcgccacaaacgctccggctaacaaaatgccgacaatgacagaacggttaaaaggtttttgttcaatacttgtgttcaatacatatcccttcttttctctaagtaattaacagtgtttttaacatggaaacgggctgtgttaaaacaccggtttgttccagatagccaatcagtgatttgagtaaaaaagcgcggggttcttccttcttcgcttcttcctccagcatagcggctgcggatgtcagttcatctacgtcatagtccgcggcggacagggaagagatgcctttatgtaattccttcaggctttccgataataggactgatttatcctttggcttgtaggaggatgctgaatgaatataaagctcgatggcttcgggcggaagaagagactggcgggtttccctgtttttgataatctgattgagggtgctgatgataaactctgcgatcgggtcaagctcaagcggtttttcctcgattttgatcagcattaaaaactcacgcatcatgccgtgaagaatgataaccaaatcccacacaaacgggagaatggtttctccatacgcctggatcagcgaatcgcggtgccagcagataatcgtcgatctggtctgatggatatgctgtttgacccggtcattgtgcagcttggggtttccgtaggtcagcatattgaaaaactgctgattccgcctgaagccctccagttccattttgaccttttgcgtcaaacgctcctccggtgtaagtgctgtattttcctgaagtcttgaggccgcggccaccatttgcttctggttaaatgacagcagctccaaaagcagatcttctttagattggaacagcttatatatcgaagcttttgacatcttacattcttctgcgatcgcctgcatggaaaccgacgtaaaatccttttccgaaaaaagctttcgcgcggctaacaagatatctgtttttttatcaagcatctcatggcttccttctttcttgaacattagaaaacccattggttcacagaaaaccaatgagtaacaatgaaaaaattttaccagataaacaaaatagaagtcaatggattttaaccgggtaaatgaaaggcctgccggaaaatccgacaggccgaataagagcttatttttcaactttaaatccttgtttttcaagcatttcacggatgtgcggatagtacaggcgctcatagtaggaagcgatgctctgtgaccagtttcttgtttcttttccgtttgtccgtttattcatgtattcagacatctgttcgtcgtatgcctgaatgtgagacgtcagctcatcctgattcaaataagtttcctgatgattgacagcttcctgcggcaagcgcggttttttcgctgaacggtcggcaggatgcccaatgacaaggccggataaagggaacacgtatttcggaagctcaagcagttcgatcagctcttgagggtttccgcgaactgcaccgatcggaactgtgccaagtccgagtgactcagccgctgctgttgctgtgccgagggcaataccagcgtctactgcgccgacaagaacagattccaatccatttgtgatttccattttgaaatcatgcagatcttcaagcgcaattttggcccggttaaaatctgcgcagaacagcaggaaaacaggagcttgatcgatccatggctggccgcctgccagctcggagattttctttttgcgctctttatcctggactgtgatcacagtcacttgctgtccgttgatagaagaaggggctgattgcaccgcttcaatgatttggtccaattgctcctgagctacaggctcatctgtgtagctgcgaatcgagcggtggtctgttaaagatttaatcacttcattcatatgagacacccttcctttactcgctaagctctgtgcggacaacatcaagaggagcgctcagcagttcttttccttttgcgacaaacccttggaaatgcgcagtttcgttatggaatttcattgccgcttcatctttccatttttcaagcatgacaaatgtattttcttcgcctactttttcgaataggtcgtattgcgcgttgccttcctcagctcttgaatgctgaacaagtgattgagcctcgctcaaaaattcctcgcgtttttctggttttactttgatgtaagcttgtaatacgatcatgtaaatctcctccgtcgttatgcgaatttattgttcgaatttcatcgaactaaatgtaacatgtattctaaatgaggtaaaggaaaaacccttatatagtaaaattgtcattctaattgttgtatgatacatttgtgtcatgaacattccaaaccatccagaaacagaaacattgcagctgacaaaggttcttcatgcacttagtgatccgcttcgtttagagctcgtcaagcaattagctgaagcaaaagaaaaaacgtgcagcacctgtgcagatgtgcaggttgccaaatcgactttgtcgcatcattttaaagttttgagagaatcaggcatcgctcaagttcggatagaaggaaagcgccggtattattcgcttcgcgctgaagaccttgaaaaggcatttccgggactgcttgaagccgtgctgaatgtagaccaggaccgctggtgaatcaatcccctgtaacggggatttttttatgtccgtaaaccgctttgaaaagccgctgcacaccctcctgaatatcttcttccttcagccgtgcaaagccgataatgagagcaggcctgcccgtttgccgcttgttttccttcaagttaaatcggctcattccgaatatttcaagctgcagcccggcagcatgtgacaggatgtcttgttcggtgcgcctggtatcaaattcggtaacaaaatgcagccccgcatttgccccttttacggtaacctctccgctgaactctgcttctaaagcggtgatcaggcgttctctcttttctttataatgctgcttcattttttttatatgcttctgatattcaccagactcgataaattcctgcagggtgagctgtgtgagtgatgagcaagtctgcagatcatagccccgctgtttgtatgccctcaacagctcaggcggcaacaccatatagctgatccgtaagccggggagaagggactttgaaaaggttcccatatagatgacattttgaaaacggtcgaggctttgcagcgccggaatactgtctacatcatatgtgaattcactatcataatcgtcctcaatgatatatcggcgcggctcctcggctgcccagttcagcagctgaattcttctggatacaggcataatcgttccggacggaaactgatgcgacggggtggtcaccagcacatctggctgctgtctggtgatttcagcaatcgacatgcctttttcatccagcatgatcgtctttacttgttttccggcattcttcaaaagctgatacatgcgcctgtagccaggctcctccatcgcatacacggcttccttgggtaaaagctcagtcaacagctgcatgagcacctgtgtgcctgcccctatgatcatttgttccggcctgcattttacacccctcgtcagggaaatgagcctcgtaatggccgctctcacttcatatatcccttgcggatgtgacatatcgccgagcgtgcggtatgagcgggaggccgctttttgctcgcagcggaaccagcttttgatcggaaaatggtctgtatcggaactcatgtgtgaaaacgatatccaatcgctctggtcgatgtgaatctcttttaggtcatccggcagtgcaaatggagggtgctcctcggcggaaaacatgtctagttcctccacgaagaaaccctttcgttcaatggcgtacaaatacccctcagccagcagctgctgataggctgaattcactgaatttacgctgaccttgagattttcagccagctcccgcttggagggaaccttcgagtgcggcagcagattgcggctgaggatttcttttttcagcttttgataaatttgctgatagatataatcggcttgttctgaacgatcgagtgtaatcgtgatatccattttgtagtttctccttctgataccatcaaaaagttataattggtacttttcatcataccaaagagaagtcagaatgataagaaaataccgacagggggatattcacatgagtcaaacaacagcaagcatcacaactgcacaatggcagcaaaaacgggatcaatttgtgtcaaaaggtgtgagcaacggcaaccgcagtctggcggtcaaaggagaaggggccgagctgtacgatctggatggccggagatttattgattttgcaggcgccatcggcacgttaaatgtcggacactcgcatccgaaggtggttgaggctgtgaagcggcaggcggaggagctgattcatcctggttttaatgtcatgatgtacccgacttatatcgaattagcagaaaaactgtgcggcatcgcgccgggcagccatgagaaaaaagcgatttttcttaactcaggggcagaagcggtcgaaaacgctgtgaaaatcgccagaaagtatacaaagcgccaaggcgttgtctcgtttacacgcgggtttcacgggcgcacgaatatgacgatgagcatgacaagcaaggtaaaaccttataaattcggtttcgggccttttgcgccagaggtttatcaagcgccgttcccttattattatcagaagccggccggcatgagtgatgaaagctatgacgatatggtcattcaagcattcaatgatttctttatcgcttcagtggcgcctgaaacggtggcgtgtgtcgtgatggagccagtgcagggagaaggcggatttattattccttcgaaacggttcgtacagcacgtcgcttcattctgcaaagaacacggcattgtttttgttgctgatgaaatccaaaccggctttgccagaactggcacttatttcgcaattgagcactttgatgtagtgcccgatctgatcacggtttctaaatcgcttgcggcaggcctgccattaagcggtgtgatcgggcgtgcggaaatgcttgatgcggcagcgccaggggagctgggcggcacgtatgccggcagcccgctcggctgcgcggcggctttggcagtcttggatattatcgaagaagaaggactgaatgagcgatctgaagaaattggcaaaatcattgaagacaaggcgtatgagtggaaacaagaattcccgttcatcggtgacatccgcagactcggggcgatggccgcaatcgaaatcgtcaaggatcctgacacgcgtgagcctgataagacaaaagcagcagcgatcgcggcctatgcgaatcaaaacggattacttttgctgacagcgggaattaacggtaatatcatccgctttttgacaccgctcgtcatctcagacagcctattaaatgaagggctcagcatcttggaggcgggcctgcgagcttaatcattggaaagaaaatggccgggtctgctatcattttaagtaatcatgaaaagaaaggaatgttcaatatgccagatcaattaacggtctacaacccggctacgggcgaggagatcaaaacgattcctcagcaatcagccacagaggtagaagaagccattgaacgttcacatcaagcgtttaaaacgtggtctaaaacatcagcgaacgaaagaacgtctcttttgaaaaaatggtatgagctgattgttgaacataaagaagagcttgcagatttaattacaaaggaaaacggaaaaccataccaggaagcagtcggcgaggtactttacggcgcaggctatatcgaatggttcgcagaggaagcgaagcgtgtgtacggaagaacggtcccggccccgacaactggtaaacgaattgttgtcacacgccagccggtcggccccgttgctgctatcacgccctggaatttcccgaatgcgatgattacacgcaaagcggcgcctgctcttgccgccggctgtacatttatcatcaagccggcgccggacacaccgctgtctgcttatgaactagcgcgcctcgcatatgaagcgggcattccgaaggatgttcttcaggttgtgatcggcgatggagaagaaatcggaaatgtgttcacaagcagtccgaaaatccgcaaaatcacgttcacaggctcaacacctgtagggaaaatccttatgaaaaacagcgctgacaccgtaaagcacgtctcaatggagctcggcggacacgccccgctgatcgtagatgaagatgcggacattgaccttgccgttgaacaggcgatggcgtccaaataccgaaacgccggccaaacctgcgtatgtgccaaccgcctgatcgttcatgaatccattaaagatgaatttgctgcgaaactgagcgagcaagtgtctaagctgaaagtcggaaatggacttgaggaaggcgtcaatgtcggcccgattatcaacaaacgaggcttcgaaaaaatcgtcagccaaatagatgatgcggttgaaaaaggcgcgaaagtgattgctgggggcacatatgaccgaaacgatgacaaagggtgctactttgtgaatccgacagtgctcaccgatgtcgatacgtccatgaacatcatgcatgaggaaacattcggcccggtcgccccgatcgtcacgttttctgatattgatgaagcgattcagcttgccaacgatacaccgtatggcttggctgcttacttcttcacagaaaactaccgccgcggcatctatatttccgagaatctagagtatggcattatcggctggaatgacggcggaccgtcagcggttcaagcgccattcggcggaatgaaagaaagcggcatcggccgtgaaggcggttcagaaggtatcgagccgtaccttgaaacaaaatatttgtccatcggtttataaaagaatgcacgctcctgagagctgccggattttccggcagctctttttgtgttccggcgaataatcacaacaattccagccaaaataacagcaaatacattttgaaagaaggttccccaacaatggatttattattggctcttctcccggctttgttttgggggagcattgttctcttcaatgtgaaattaggcggcgggccgtacagccagacactgggaacgacgatcggggcactcattgtttctatcgttatttacttttttgttcagcccgttctgtcccttcgcatttttattgttggaatcgtatccggcttattttggtcacttggacaggccaaccagttgaaaagcattcaattgatgggcgtgtcgaaaacaatgccgatttccacaggaatgcagctcgtttccacctcgctgttcggtgtgatcgtgttccgcgaatggtcaacaccgattgcgattacgcttggcgttctcgctttgatctttatcattgtgggaatcattctcacgtccttggaagataagaatgataaaaaagagggcgagccaagcaatttgaaaaagggcattttgattctccttgtttcgactcttggttatttggtttatgtagtcgtggctagattattcaatgtgtccggctggtccgcgctgctgccacaggcaattggcatggtggtcggggggttagttttaacctatagacacaaaccctttaacaagtatgcgatcagaaatattctcccagggttaatctgggcaggcggaaatatgtttttgtttatttctcagccgcgagtcggcgttgcaacgagcttttccctttcacaaatgggaattgtcatttctacgctcggcggtattttcatcctgcgtgaaaagaaaacgaaacgccagctaatagcaattgcgatcgggattatcctgattattgccgccgccgtattcttaggaatcgccaaaacaaattcataacaaatggaggaggatgtatatgtatccggatttaaaaggaaaagtcgtcgctattacaggagctgcttcagggctcggaaaggcgatggccattcgcttcggcaaggagcaggcaaaagtggttatcaactattatagtaataaacaagatccgaacgaggtaaaagaagaggtcatcaaggcgggcggtgaagctgttgtcgtccaaggagatgtcacgaaagaggaagatgtaaaaaatatcgtgcaaacggcaattaaggagttcggcacactcgatattatgattaataatgccggtcttgaaaatcctgtgccatctcacgaaatgccgctcaaggattgggataaagtcatcggcacgaacttaacgggtgcctttttaggaagccgtgaagcgattaaatatttcgtagaaaacgatatcaagggaaatgtcattaacatgtccagtgtgcacgaagtgattccttggccgttatttgtccactatgcggcaagtaaaggcgggataaagctgatgacagaaacattagcgttggaatacgcgccgaagggcattcgcgtcaataatattgggccaggtgcgatcaacacgccaatcaatgctgaaaaattcgctgaccctaaacagaaagctgatgtagaaagcatgattccaatgggatatatcggcgaaccggaggagatcgccgcagtagcagcctggcttgcttcgaaggaagccagctacgtcacaggcatcacgttattcgcggacggcggtatgacacaatatccttcattccaggcaggccgcggttaaacataaaaagcgacccagacatgacatctggatcgctttctttattaggcacgctttttctttacaagtgctgctacagataaaataatggcagccgcagacagcaccatcgctgtaatgtctagagctgaagaacctgagttttcggaatcgtcttctgttttcgtggcgccgtgctcatctgtcacttgctttgcagacgtgatgtttgtaatggaatgaggtgtatcggcatcctcgtcacctgtccactcaacaatgctgccgtctttgtaatattggtatgcgtcccaagcagcttcctccgctttgtcagggtttttggcaacaaaggtaaactgctggaactggccttcctgaatgcctccgtcagtcgcctcccatgtcacggatactgatttgtcatcatgtttttgagtggaaaccttccagcccggaattggctcatattgctggaattcaacatccttcggcattttgaggacaaccttcgttgtcggcagatttttctcagaaggaaccttcattgtatacgtttcccaagagcctgcagcagactcagccggttttacagaaacatgcgcgctggcaggggccgtaaagaataagagggagccgacaatagccggacatagtgtcaatgcgatttttttcaacaacgtaaacactccttaattggtctttgtaaacatgatattgatttcgttaaagtcgccggtcaggccgtggactttgatcttccagtttcctttttcattaatcgacaggttttgatcttggaagacgccttttgttttttcttttaatgtaaaggtgcttttgttttcgctgcctgacaggcctgttttataaacggttaacgtgatttgctggatgtttttcacgggatcaccgttatggtcggtgacccgcagctcaaaaacattttttccaggctggtttgggctgatgctgagagaaacgctttgtccgttctctatcgctttggtttggtagaacggttccggcgctggctcaggcgggcttggcaggcttgtaaacacggccgctgtgatcaatacagcgatgccgattgcccactccgctttcaacgttcggctgattcctgtgcggcgctgctttctggtaagcagaaaatgaattgcgcctaagaccagcatgaaaacaaacagcccgcttttcactaaaagagcttgtccgtacgctgtatggaacagtgaatccattgaacgaatgatgaaaaatccattgagcaagcctgaaaacaaaatgacgccgactgcagtgagcgcccatggggagaaccgtctgaccgtctcccacgcgagcgttttgtcaggctgcctccattcttttgagagcagcaaaacgagtgccgctattccgccgacccagatggaagcggaagttaaatgaaggaaatccatcaaaatgccgaccgttttttcttcaacgacagcagcatgcccggtaaacgccttggcaagcaggagaccgaaaaagaaaatgagcggcgctgtccaatagccaaaggatgaaaagcggtttttccgtatcgcagggatgacagacagtgcgagcagcacgaacagcgcagcctgtatgatccaaatggagccgcctgctgtctcaaacagtgtttctctgatgtagcccggctggaatgcgctgccccagccgccgcctgcgttcgcttttgtctgaatcggaagctgaagcaaaagcgccagccccaatgctgcgatcgagccggtcaggatacgtctcgtccgtttgacgagctgttctgatttccctttataccagaaaagatggaagaaaaccgttccgataaacagagataaggctgtatacagaatcgcgcgatctgctgctgttcccggattcagcgctgaatcggctgctttttggctgctgaatccgccatccgctttcccgatactgaacggaatgacgccggaaacaggatgtccatccgcggatacggcattccattccgctctgtacacatctttaggcagattcttcttcagcttcactgtcatgatgtgatgattatcttttttgatttcagtcttgtccgtatccacacggtcgccgtttgaattatagactttaatgtaatgaaacccttcttcaaccggttcattaaattcgatttccacctgcgcaggggcgctttttaattcgctgttttccccaggtgaagatttgacaatataggcgtgagcaaagcttgttttcggcaggaaaacaagaaaaagcagaaggatgatccaccatctgtttcgcttcatcactcagacaccaccttccgctgtatgtgttgtgttatttcttggtgcaggtgcagcgtttctttcggtcttgaagcatgtcttccagcgcttggtcgaaagtgcagacggctccgccgaatcctttttgaaatcgttcggcatggtcaagtgtcgcaaacggaatggcctgcggctggcagcagtgcaggtttaattcagcatttacgacgaaataagccgaaccggcactgacggttgtctgtaacagaaaatctctgcaaatcaagtgtgaaacctcttccgttttatccgcgtaacgcaaaaacgcgcaatgtgcgcagcatagctgttcaatgtcttggtttaccgtaatcagctgaaccgaatgagcttgattgacgggcttcaagcaatagctgcacatatgatctgtttgaggtgttcggacggggagcgtgatgccgccggccgttttaatgacctgatttgactgaaccagctgattgacatctctatataccgtcatttccgaaacgccgaaccttgcgctgatgtcagaaattctaagcgagccttcttctttcagccacttcagtatgtgttgctgtctattaatcggaagcattcatacaccctcttcattaagatctatttaagcgtagaggattttagagacggagacaagtaagtggatgataaaaaatgtgaaaatgtgttgaacagcaacaaaacgaaacagaagggactctggtataatagacagatggaatagaaagtgaggaataccctatgaaagaaacaccatgcccgaactgcggcaaacctttgacaggcgatatggtcagatcatcaaatgtgccttgtcaatttcgctgcggccactgccgggaacggctttatgaatataaagtttcagctccgattatgctggtatcattagcggccatcgtgctgcttatttatcttttgatgctcctccgcaatgcggcaggctcagtgctgccagctgtacagcacgtgccgatggctgtatttgcgcttgtgtgcgcgtatcccgtttttattgtgagtgagcggatgattgcaaagtacgtgattcaaaatggcaacatcatttatagaggaaagagaaaaggctcctgaaaccaggagcctttttatttttaaaaaattgtcacagtcatgtgccaaagtcctctttactttcaattgtatagggactgtaagcgttttaacatagagtcaaagggaagcatcattctctgaacatatttttgtatcttacagcgacaaacaaaacagggagggtttatatatgcagcagcaagaacagcagcaaggcggcatgaaagtgaaagtgcaacgctttgggagttatttgagcggaatgatcatgccgaatatcggcgcgtttatcgcgtggggtatcattaccgcgctgtttattccggcaggatggtttccgaatgaacagctgaacacgctggtcagcccgatgattacgtatttattgccgcttttgatagcgtatacaggcggaaaaatgatctacgaccaccgcggcggagttgtcggagcgacagcggcaattggggtgattgtaggatcggatattccaatgtttttaggcgcaatgattatgggtccgcttggcggatacctcattaaacagactgataaattattcaaggataaagtcaagcaaggctttgaaatgctgatcaacaactttacggcagggattgtcggcgcggctttaacgattctcgcgttttacgccatcggcccggttgtcttgacgctaaataaattgctggcggctggtgtggaagtcattgtacacgctaatttactgccggtagccagtgtttttgtagaaccggcgaaagtgttgttccttaacaacgccataaaccatggaatcttaagcccgatcggaatcgagcaagcatctcaaacaggaaaatcaattctgtttttagtagaagcaaaccctggaccggggctcggcattttgctggcctacatgttctttggcaaaggatcttcaaaatcaacggctcccggtgcggcgatcatccatttcttcggagggattcacgagatttacttcccgtacattctgatgaaaccggccctgattctcgcagccattgccggcggagcaagcggactcttaacatttacgatctttaatgccggacttgtcgcggcagcgtcaccgggaagcattatcgcattgatggcaatgacgccaagaggaggctatttcggcgtattggcgggtgtattggtcgctgcagctgtatcgttcatcgtttcagcagtgatcctgaaatcctctaaagctagtgaagaagacctggctgccgcaacagaaaaaatgcagtccatgaaggggaagaaaagccaagcagcagctgctttagaggcggaacaagccaaagcagaagaagcgtctgagctgtctcctgaaagcgtgaacaaaattatctttgcgtgtgatgcgggaatgggatcaagtgccatgggggcatccatcttaagaaacaaagtgaaaaaagcggagcttgacatcagtgtgaccaacacggccattaacaatctgccaagcgatgcggatattgtcatcacccacaaagatttaacagaccgcgcgaaagcaaagctgccgaacgcgacgcacatatcagtggataacttcttaaacagcccgaaatacgacgagctgattgaaaagctgaaaaagtaatcttatagaaagagagtgattgtcatgcaagtactcgcaaaggaaaacattaaactcaatcaaacggtatcatcaaaagaagaggctatcaaattggcaggccagacgctgattgacaacggctacgtgacagaggattacattagcaaaatgtttgaacgtgaagaaacgtcttctacgtttatggggaatttcattgccattccacacggcacagaagaagcgaaaagcgaggtgcttcactcaggaatttcaatcatacagattccagagggcgttgagtacggagaaggcaacacggcaaaagtggtattcggcattgcgggtaaaaataatgagcatttagacattttgtctaacatcgccattatctgttcagaagaagaaaacattgaacgcctgatctccgctaaaagcgaagaagatttgatcgccattttcaacgaggtgaactgacatgatcgccttacatttcggtgcgggaaatatcgggagaggatttatcggcgcgctgcttcaccactccggctatgatgtggtgtttgcggatgtgaacgaaacgatggtcagcctcctcaatgaaaaaaaagaatacacagtggaactggcggaagagggacgttcatcggagatcattggcccggtgagcgctattaacagcggcagtcagaccgaggagctgtaccggctgatgaatgaggcggcgctcatcacaacagctgtcggcccgaatgtgctgaagctgattgccccgtctatcgcagaaggtttaagacgaagaaatactgcaaacacactgaatatcattgcctgcgaaaatatgattggcggaagcagcttcttaaagaaagaaatatacagccatttaacggaagcagagcagaaatccgtcagtgaaacggtaggttttccgaattctgccgttgaccggatcgtcccgattcagcatcatgaagacccgctgaaagtatcggttgaaccatttttcgaatgggtcattgatgaatcaggctttaaagggaaaacaccagtcataaacggcgcactgtttgttgatgatttaacgccgtacatcgaacggaagctgtttacggtcaataccggacacgcggtcacagcgtatgtcggctatcagcgcggactcaaaacggtcaaagaagcaattgatcatccggaaatccgccgtgttgttcattcggcgctgcttgaaactggtgactatctcgtcaaatcgtatggctttaagcaaactgaacacgaacaatatatcaaaaaaatcatcggtcgctttgaaaatcctttcatttcggacgatgtgacccgcgtagcgaggtcacctctcagaaaactgggagaaaatgatagacttgtaggcccggcaaagaaaataaaagaaccgaatgcactggctgaaggaattgccgcagcactgcgcttcgatttcaccggtgaccctgaagcggttgaactgcaagcgctgatcgaagaaaaaggatacagcggcgtacttcaagaggtgtgcggcattcagtcccatgaaccgttgcacgccatcattttaaagaaacttaatcaataaccgaccacccgtgacacaatgtcacgggctttttttactatctcgcaatctagtataatagaaagcgcttacgataacaggggaaggagaatgacgatgaaacaatttgagattgcggcaataccgggagacggagtaggaaaagaggttgtagcggctgctgagaaagtgcttcatacagcggctgaggtacacggaggtttgtcattctcattcacagcttttccatggagctgtgattattacttggagcacggcaaaatgatgcccgaagatggaatacatacgcttactcaatttgaagcagtttttttgggagctgtcggaaatccgaagctggttcccgatcatatatcgttatgggggctgctgctgaaaatccggagggagcttgagctttccattaatatgagacccgccaaacaaatggcaggcattacgtcgccgcttctgcatccaaatgattttgacttcgtggtgattcgcgagaacagtgaaggtgaatacagtgaagttggcgggcgcattcacagaggcgatgatgaaatcgccatccagaatgccgtgtttacgagaaaagcgacagaacgtgtcatgcgctttgccttcgaattggcgaaaaaacggcgcagccatgtgacaagcgccacaaagtctaacggcatttatcacgcgatgccgttttgggatgaagtctttcagcagacagccgctgattatagcggaatcgaaacatcatctcagcatattgatgcgctggccgctttttttgtgacgcgtccggaaacgtttgatgtcattgtggcgagcaacttgttcggtgatattttaaccgacatcagctcaagcctgatgggaagcatcggcattgcgccttctgcgaacatcaatccatccggcaaatatccgtccatgtttgaaccggttcacggctcagctcctgacattgccggacagggccttgccaatccgatcggccagatttggacagcgaagctgatgctcgaccacttcggagaggaagaattgggggcgaaaattctggatgtaatggagcaagtgactgccgacggcatcaaaacacgcgacattgggggacaaagcacaacggctgaggtcactgatgaaatctgttcgcgcttaagaaagctctgatgaatcaggccggtggcagatggctgccccggcctgtccatttccttacgaaaatttccacgaaagtctaaccaagcagatccaaatgctgtataataatttggaattcttaggaaagcatcgggtgaaggaagttgaatgcaaaaacaatcacgttaaagaaaaaaagaaaaatcaaaacgatcgttgtactcagtatcattatgatcgcagctctcatttttacgatcagattggtgttttacaagccttttcttattgaaggatcatcaatggccccaacgcttaaagactcagaaagaattctggttgataaagcagtcaaatggactggcgggtttcacagaggagacatcatagtcattcatgacaaaaagagcggccgctcatttgtcaaacgtttaatcggtttgcctggtgacagcattaaaatgaaaaatgatcagctatacataaatgataaaaaggtggaagaaccatacttaaaggaatataaacaggaggtcaaagagtcgggtgtaaccttaacaggtgacttcgaagttgaggttccttccggtaaatattttgtgatgggagataaccgtctcaattcactggatagcagaaacggaatgggcatgccttctgaggacgatatcatcggtactgaatctctcgtcttttatccattcggtgagatgagacaggcaaaataaaatgcaatgcaaaaagaacatggaacatgacggcaccgataataaagcgccgtgcacgtttaaaaaaatgatgatgaaacggtgcggagccggctttccgccccgttttttatgatagaaagcgttttgaagaaaagggccctgttgaaataaacagaatcaggattggcgaagccgtgaagcgcatcgaattggtaaatctcaagatgggtatgctgtttttcccgcagttttttgataagaagcgctacgtcaaacgacggctcataattagggaaaaacaataggaccgggcaggctggcatgtgatgaagagagtcgcgtatccgggaaccgtaataacaaaccgatccgctcacctcaggcatactgctgcatttccatgcgatagtagcccccacgctgaatccaatcacaaagatgtgccgtccggcgttttgcctgatcacattctggatgatggtttctcccgttttcagcctttcgtgttttgtaaattgttcgtatgccgttttttcttctttcagtgtgtagacttcatcctcgccgagcaggttgggcgtcaacacatcatatccagccattttgatcagccggcccatctttttcatatggctgtttacaccatatatttcgtgtgcgagaatgacaagcggttttgggaacataacggcctccttttgtgttttttccattatatcctatcgtttcactttaggctgagatataatggtcaaaaaaaggagatataaaatgaactcattatctttgcctcaccgctatccatttttgtttattgatggcgtgacggatagcgagcccggcaaacatgcggcagcttataagctgattagtgagaacgactggtttatcactgatacgcaaacagaaatgccgttttcacttgtgattgaagcgcttgcgcaaaccgcggcttttacaggaattacagatgagaacagcttgggattattgtcttcggtgaagaaagcggaaaagctgggagaagctgtgcctggtgaccggcttgatcttacgtttgaagtcacgcgcaatcggcgcgggtttgtgttcggacatgccaaggcatcagttggagagcagcctgttgctgaagctgaaatcggcatctatattgaaaaatgaaaaaaacccttcacaacattttgtgaggggttctattttgtgtcgtaatcccgttcgctttgagagttatctctttgctggcgtttgtgtttttcatcattcatattttccttcagctcttcattaggaatcggatcggttaagtcgttgtgctcggggttttcatttggtttgttttgctgttttttttctgtcatgtttgatcacctcaccgtttgttttcctcttattcattctcctcaaacataggaaatcgcttttttgtcccgctgggtataatgtattagaatagagagaagcacaacaaaaagataaagagaggtacatatatgtctgttcaaagagaagatgtagatatcaagctgatcgcaattgatatggatggtacactgctgaacgacgagcagctgatctcggatgaaaaccgcaaagccattcgtgaagcggaggataaaggtgtgtatgtggtgatcagcacgggccggacgctgatgacgtgcagggagctggcggaatcgctaaagctgtcatcctttctaatcacggcaaacggcagtgaaatttgggattcgaattttaatttggtggaacggaagctgcttcatacggaccatattcaaatgatgtgggatttgcggaataagcacaacactaatttctgggcttctacggtgaataaagtatggagaggcgagtttccggaaaacattacggatcatgaatggctcaaattcggctttgacatcgaggatgacgatatccgaaacgaagtgcttgaggagctgagaaaaaacaaagagctcgaaatcacaaattcaagtccgacaaacattgaagtcaacgcgcttggcatcaacaaagctgcagcccttgccaaggttacggaaaaactcggctttacaatggagaatgtgatggcgatgggcgacagccttaatgacattgcgatgatcaaagaagcgggtcttggcgtcgcaatgggcaatgcgcaagacatcgtaaaagaaacggctgattatatcacggatacaaatattgaggatggtgtcgctaaagcgattcgccattgggtactataaaaaaagagagtcctaagatggactctcttttttagtttggcaggttttattctgggaccatggtaggttttctgacaaaagtatttcacaaactgatatgattcacttataatgaaataaagttcaaaaattcggaatagtcgttccgaatttcgggacaataaatgacataaagcatatcgtttgctttggcaggagggattctgtgtttcagattgatttaaactgtgatttaggagaaagcttcggagcctacaagataggccttgaccaagatattttagagtatgtgacatcagcgaatatcgcatgcggatttcatgcaggagatcctagtgttatgcgaaaaaccgtcgcgcttgcagcagaaagaggcgtgaaaatgggtgcgcatccgggcttgccggatttactcggttttgggcgccgcaatatggcgatttctcctgaggaagcgtatgatcttgtcgtttatcaaattggcgcgctctctggctttctaaaagcagagggacttcacatgcagcacgtcaagccgcatggcgctttatacaatatggcggcagtcgatcaaaaactgtcggatgctatcgcgaaagctgtctataaggttgatcccggcctgattcttttcggtcttgctgagagcgagcttgtaaaagcgggagaacggatcggacttcagaccgcaaatgaagtgttcgccgacagaacataccaatcggacggcacgctgacaccgcgctcccagccggacgcactcattgaaagtgatgatgccgccgtcacccaggtcatcaaaatggtgaaagaaggggcggtcaaatctcagcaaggacatgatgtgtcattaaaagcagatacagtctgcattcatggagatggagcccatgcgctgacatttgcgcaaaaaatcagaaaacagctcaaagcggctggaattgaagtgacagctatttcagaacagaggtcaacataaaggaggaacaatagatggagcagcagaaaaagacagcaggaaaaaaagcgggcagctggtcattgctgatgggcgccgcctttttaatggcgacatcagcaatcggaccgggtttcctcacccaaaccgcaacattcacaaacacactcgcagcaagcttcggttttgtcatcttaatctctattattttagatattttcgcccaaaccaatgtgtggcgcatcatcgcagtttctggaaaacgaggtcaggaaattgcgaatatggtgcttcccggactggggtatttcatcgccattctcgtcgtgcttggcggactagcttttaatattgggaatatcggaggggccgggctgggacttcaggtgctgttcggcattacacctgaaacaggcgctttaatcagtgccgttatcgccattttgatttttgtcatcaaggaagcaggaaaagcgatggaccgttttacgcaaatcgcggggttcgtgatgattattttaacggtctacgttgcggcgacgacagctcctccggtcggacaggcagtcgcaaatacattcgtcccggaacacatcagcatatttgccattgtcaccctagtgggcggaaccgtcggcggttatatcacatttgccggaggacaccgtttgcttgatgccggaattaaaggaaaggaatccattccgcaggtgacaaagagctcggttgtcggcattttaattacatctgtcatgcgtatcgctctttttcttgcggttctaggcgttgtatcgaaaggcctgcacatcgatgaaagcaacccggcggcttctgtcttcaagctggctgctggaaatgtcggttataaaattttcggattgatcatgtggtctgcggcgattacgtctgttattggagcagcctatacatctgtttcattttttaaaaccttttctccaaaaattgaaaagaattcacgcggtattattatcggatttattgtggtttctacgttagcttttgtcacaatcggccagcctgcgaagatcctcgtccttgtcggttcactgaacggcttaattctgccgattgcgctcggaacgctgcttgttgccgcctacaagaaaaacattgtcggtgattataagcatccgctttggctgacaagcacaggcgcgcttgtagtgattgtaatggcagttatgggaatctacacgttatgtacacaacttcctcaattgtggagctgatataagtggagcaattaaacaaaatggcgccaaaggatgtacgcgccctgatacgagaggggaaaataaacgggccgaccgcaggcatgtccggcggctacgcccaagcgaatcttgtggttttgaaaaaggaccttgcgtttgattttctgctgttttgccagcgaaatcaaaagccctgccccgtgctggatgtgactgaagcaggttcgcctgtgccgtctctggctgcgccggatgctgatatcagaacggactttccgaaataccgtatttacaggcacggtatcctaacggaagaagtatctgatattacgccatactgggaggacgattttgtcggctttctgatcggatgcagtttctcctttgaacaggcactgatcaataatgggatagctgtccggcatattgatgaggggacaaacgtctcaatgtataaaacgaatatcgattgtgttccggcgggggcgtttcacggacagatggttgtcagcatgaggccggttcctgaacggctggctgtacgtgctgcacaagtgacctcgcgttttccggctgtgcacggagggccgatccatattggcaatccgggagcaatcgggattcgcgatctcgggaaaccggatttcggagatgccgtttccattcgtgacggcgaggttcctgttttttgggcatgcggagtgaccccgcaagccgtggctatgaatgtaaagcctgaaatggtcatcacacatgcgccggggcatatgctcatcacagatattcgagacgagtcgcttgcggtgctgtagcctctcgtcatcctgatgaacgagaattaaaagaggtgagaaagatgactgtacgatatcaaatcgaacagctcggtgattctgcaatgatgatccgattcggagaagaaatcaatgaacaggtcaacggcattgtccatgcagcggccgcttatatagaagaacagccatttccgggattcattgaatgtatcccggcttttacaagtctaaccgtattttatgatatgtatgaagtgtacaagcatttgcctcaaggcataagctcaccttttgagagtgtcaagcgcgatgtcgaagagcggctggcagaaatagccgaagactatgaggtcaaccgccgtattgtagaaattcccgtttgctatggcggtgaattcggtccggatttagaagaggtggcgaagatcaatcaactgtcaccggaggaagtaatcgacattcatacaaacggtgaatatgtggtgtatatgcttggcttcgcgcccggttttccttttctaggcgggatgtcaaaacgcattgcagctccgagaaaatcatcgccaagaccgtcgattcccgcaggttcggtcggtattgcgggattgcagacaggcgtttatccgatttcaacgccgggcggctggcagctgatcggcaaaacgccgctggctcttttccggccgcaggaaaacccgccgacattgctgcgggcgggagatattgtgaaattcgttcgcatctcagaaaaagactatcacgcctataaggaggagtccaattgagcatgaaagtattaaagcccggactgctcacaacggttcaggatataggcagaacgggttaccaaaaatacggcgttctggccagcggcgctatggacacggtttcactgcgcattgccaatctgttgataggaaacggcgaaaatgaagcaggtctcgaaataacgatgatggggcccggtccgtcgtttcatttttcaaaacagacactgattgctgtgacaggggcggacttcacgctgcgtattaatgacgaggaagcgcctttatggaagcctgtgctcatcaaggaaaacagcacggtcagctttggcccctgcaaactcggcagccgtgcttatttggcggcagctggcggcattgaggtgcctgccgtcatggaaagtaaaagcacatacgtcagaggaagcattggcggacttcatggcagagcgcttcaaaaagaagatgaactgaacattggagagatgtcagctctttcgcaaaccatcctttctcgcttaagttcgcagcttggaaaacagggatttgcagcaccgaagtggtcagtcagccgcggcagatttctgccattgaagaagaatcccgtcattcgggtgctggaaggaaagcaatttgcctttttcacagaagaatcaaaaacgcgtttttatgaagaagcatttcgtgtcacgccgcagtccgaccgtatgggctacaggctcaaaggagaaccgctcgaactgaaggccccgcttgagatggtgtcggaagcggtttcattcggaacagttcaggtgccgcctgacggcaacccgattatcctgcttgcagaccggcagacgactggcggctatccgaggatcgcgcacatcatatccgctgatcttccgattgtttcccaaatcatgccgggcgagcacgttcagtttgagcctgtgtccctccaggaggcagaagcgcttgcggtagaacgggaacagcatataaaagaactgaaaacgagaatgaagatggaatggctgacatagcaaaggggatgaatgatgcagaataaaaataaaaccgtagtcaaatctatggcgctgcttaatttgtttttgcataaaccaagcctaaccttaagtgaactggtgtcgctgacgggaatgccgaagacctctgttcaccggatggtcagctccttggaggaaatggggttcctcagtcgggatgcgtccggcgcttattcgctgggattggtgtttttggaattcggacagcttgtcgctgacaggctggatatcagaaaaatagcgaaaccggtgatggaagagctgtgccgggaagtggatgaggccgtgcagttgatcatgagggacggcaatgaagcgatatacgttgagaaaatagaagggacacagactgtgcggctgtatacggcgatcggcaggcgttcccccctatacgcgggagcgtgcgccagaagcattctgtcctttcttccccgtgaagaaatcgaagcatacatcaaacaaaccgagctcatttcgattggctccggaacgattaccgatcccgaaaaactgcttcaggagattgatgcctctgtgcaaaatggctatactgtcagctattcagagctcgaaaactatacggcggcgatcggcgccccgatctttaaccatgagcgccaggtggcagccggcattagcattgcaggctttgaagcgagatttacagaagacaggctgccctatttaacagaaaaggtgaaggacgccgctttacagatttcaagaaaaataggatatacataagtagccaatcttttctctgctgcgtacattaacgtatcgacgttcaagagtggaggaaagaacatggtgcttcgatatacagctctgggcgattccttgacgacagggagaggctccgggctgttttcacccggcttcgtccagcgttttggggacatgatggaagctgacttgaaaacaagaacggcaataaacatatttgccagatcaggtctgaatacagaagagattttgggactcctgtcatatccctatgtgcaaaaatgtattcgagatgctgatatgataacgatcacagggtgcggaaacgatctcatcgattcggtcttagcctaccaaacctctaaggatgaaacgattttcagccgtgtatccgcccattgccatgagaattttgaaaagatgattgccaaagtcgccgagattaaaggagaaaatccttccccgtacgccattcgtgtgttcaacttatacaatccgtttcccgaaattgatatcgccggcaaatggatcacttcgtttaattcacatttagaaacacttgcatcagcaccccatgtcaaaatcgcggatgcctatagcatcttcaaaggcaaagaacaggaatatctgtcctttgacggtgtccatccgaacagcaaaggctatcaagcgatggctgaagccgttcacaagctaggctataaagaattatcagtttcatagaaaacgcgcctcatgacaggcgcgttttttatgtgtgatcgaaatattaaaagaaacttaaaattctctgtcttctgttctacagacaaacaaagtgcgctagaataatggagggcgtaggcaaatatagccataacgttcaatatttcgtatataaggaaggatggtccttttgtttcggatttttaaaatgtcttttgcggttatcattattatactggcgcttattgcttttaactatacggaacacacctctgtaatccaatcggtcatgctcgtctttcttggtgcggtcatgtttatgcaggggcttgaagagcgcaaaaaagaaaatgacggctcaggcgcttttaatatttataccgccgtttttgtatggtctgtctcccttatcggttttacacttcatattatataaatctattacacatcctgaaaatgctcgaccgtcgggaacggggtatagaaccgatgaagcaaggctttccactcttgatactctgaagaaccgcgaaagccttccgtatggtcctcaagtgtttcccactccacaagaagcagatatttatgcgtttcctccatgcattttgataacgagtgagtgatatagcccttcatgccggaaataatcggcgcagcttgccggaatgcatcctcaaactcttgttcaaggccttctttaatgtgaagcattgctgcctctctgaccatgctatcccttctttctgtcttttcaaatagtctacagcaaacgataggagatttctgcaaaatcggtgaacttttccttcattttcaaaaaaatcttgcacgcaccaattcaattaagagaaaataacaagtggaaggcaggggaaagtcatgttaaaaaagtgtattctactagtatttctatgcgtcggattgattgggttaatcggatgctccaaaacagattcaccagaggatcgcatggaagcattcgtgaaacagtggaacgatcagcaattcgatgacatgtatcaaagcctgactaaagatgtcaaaaaagaaatctccaaaaaagatttcgtcaacaggtataaagccatctatgagcaggccggcgtaaaaaatttgaaagtcactgcgggagaagtagataaggacgatcaagacaacaagacgatgaaacatatcccgtataaagtcagcatgaacacaaatgccggcaaagtcagcttcaagaatactgctgtgctgaaattagaaaaaacagatgacgaggagtcatggaatatagattgggacccatcgtttattttcaagcagctggctgacgacaaaaccgtgcaaattatgagcattgaaccgaaacgaggccaaatttacgataaaaatggaaaaggcttagccgtcaatacagatgttccggaaattggaattgttcccggagagcttggcgataaaaaagagaaagtcataaaagaactcgccaaaaaacttgatttgactgaagacgacatcaagaaaaagctggatcaaggctgggtaaaagacgattcgtttgtgccgctcaaaaaggtcaagcctgaccaggagaaattagtttctgaagcgacgtcattacaaggcgtaacaagaacgaatgtcagctcccgctactatccgtatggcgaaaagacagcccatttgacaggctatgtccgcgccattacagcggaagaactgaagaaaaagaaagaaggaacgtacagcgatacgtctaacatcggtatcgccggacttgaaaatgtgtatgaagacaagctaagaggcacaactggctggaaaatctacgtgccgcaaaccggggaagtcatcgctgaaaagaaagcaaaggacggcgaggatcttcacctcacaattgatatcaaaacgcaaatgaagctgtatgatgaactgaaggatgacagcggggcggcagtcgcgctgcagccgaagacaggcgaaacactcgcccttgtcagcgcgccttcctacgatccaaacggatttattttcggctggagcgataaggaatggaaaaagctaaacaaagataaaaacaatccgttttcagcgaaattcaataagacatacgcgccaggttctaccattaaaccgattgcggctgctattggaatcaaaaacggcacccttaaagccgatgagaagaaaacaatcaaaggcaaggagtggcaaaaagattcaagctggggcggctattcagtgacacgtgtgtctgagagacttcaacaagtcgatttggaaaacgcccttattacgtcagacaatatttattttgcccagaatgcgcttgatatgggagcggacacctttacaaaaggcttgaagacattcggtttttcagaggacgttccgtacgaattcccgatccagaaatcgtctattgcaaatgacaagcttgattcagacattttgcttgcggatacaggctacggacaagggcaaatgcaaatgtctccgcttcacttggcaactgcttacacgccatttgttgacaatggagaccttgtcaaaccgacgctgatcaaaaaagattcacaaacagctgatgtttggcacaagcaagtggtcacgaaggaaggagcggcagacattacaaaaggtctgaaaggcgttgtggaagatgagcgcggatcagcgtatcagcctgtcgtgaaaggaatcacagtggctggaaaaacaggaacagccgagctgaaaacatcaaaagatgataaagacggcacggaaaatggctggtttgtcggctacgattacgaaaacaaagacctgcttgtcgccatgatgatccaaaatgtgcaggaccgcggcggcagccactatgtcgttgagaaagcgaaaaagcaatttcaatcgaattaaaatgtctttttaaaaggagcgaaaggaaaaaggggatctgaggccgaatgaactagtaaggggcaaaacccggtttatacaaagaaaagagggattttgcatgcagcgtattcaattggcggaggatcttcaattttcaagagtcatacacgggctttggcggctgaatgaatggaactattcagatgctgaacttctaagcctcattgaatggtgtatcgatcacggcatcacgacctttgatcatgcggatatttatggaggctatacgtgcgaaaagctgtttggaaacgcccttgccctttcgcctggattaagagaaaacatagagttggtcacaaaatgcggtatcgttcttgaatcgcctgaacggcccgctcacagatcgcatcattataacacaagcaaatcgcatattttggcatccgttgagcaatcgcttatgaaccttaggacggattatatcgatatgcttttgattcacagaccggacccgctcatggatccggagggggtagcagaggcgtttcaggccttgaaatgctctggcaaggtcaggtactttggcgtttcaaattttaaagatcaccagtatcggatgctggaatcatatttgcctgagaagctcgtaaccaaccagattgagctttccgcatacgaattagaaaatatgctcgacggcactttgaacctgtgccaggaaaaacggattccgccgatggcttggtcgcctctggcaggcggcaaagtattcactgaaaacacggataaagaccgacgtgtccgtacggcgcttgaatccgtccaaggggaaatcggcgccgcttcattggacgaggtgatgtacgcatggctgtatacgcatccggccggcatcatgccgattgtcggaagcggaaagcgcgagcggatttccgccgcgataaatgcgttgtcatacaagcttgaccaggatcaatggttccgcatttttacagccgtacagggttacgatattccataaaaagcatcagtttaccagctgatgctttttcaatattgtcacaccgcttagtgccaaattaccatttataagtgattgattctttcttgaaagcgttttatattaaaaggaaacctctctatatcctctactgcatctccttgcgacttcatccgcacatcaagattggctaggaggtcttttttatgtatatgactgccagagaacaaaagctgttaaagcacttattattacaaaacagatatataaccgtaactgagcttgctgagctgatgcaagtcagcacgagaaccattcacagggaactcaaatcaattaaaccgctgatggaaaccgtggggcttacgttagataaacagcccggtaaagggttgaaagcagtgggaagtcccgagggtaaacaaaagctgcttactgatttatcatatgaacagcatgaatacagcgccgacgaacggaaactgctcattctttgttcgttattagagtctcaggagcccgtcaaactgtacacgcttgctcatgatctccaggtgacgaatgccacggtcagctatgacttagatgagctcgagaagtggatttctccctttggactgacactgatccgcaaaagaggttttggcatccagctcatagggccggagaatgcgaaacggaaaattgtcggcaacttgattgtgaaccgtctcgacatccaaatgtttttggaagcggttgaattaaacatcaaaggaaaaaccgattcttcagagaaaatgttcggggttgtcagcaaaggtgagctgttaaaaatggagcgcatcttatttcagctcaaagaaaaaatcgctttttcattgtccgacagctcctatatagcgctcgtcgtccatctgacgtatgcgatcgaacgaattaagcttggggaaactatcaccatggagcaaaatgagcttgaggaactgatgaatgcgaaggaatacagctccgctcttgaaatcgcgggcgagcttgaacgtgccttcggcgtgacgattccagaggcggaggtcggctatattacaatccatcttcgaagcgccaatcgaaaatacaaaacagaatacaaagcgcaggaaattgagctggaaacagccctgcaaacaaagcggctcattgcttttatttcagacaaaatcagaatggatctgacgaaaaactactctttatatgaaggcttgattgcccatttggagccggccgtcagccgcataaaagaaaatattgagatatacaatccgatgaaggaacagatcaagcgcgattattttctgctttatatggcgatcgaagaaggtgtcgaaaagtattttccgggcatgtccttttctgatgatgaaatcgcttttatcgttcttcactttggctcggctcttgaaatcaaaaaagaagaagcaaaagtgaaagcgcttgtcgtctgctcaagcgggatcggctcctcgaaaatgcttgcctccagactgaaaaaagagctgccggaaattgaatcgtttgatatgtcatctctgatcgagctaaaggggaaggatgttcaagcctatgatatgattgtgtccactgtaccgattccttatgaaaacattgattacatcatggtcagcccactattaaatgaggaagacgcaaaccaggtcaagcagtatatcaagcggaagattccccttattcttaacaaaaaaagaagctcgaaggaagaggcgcagcaagctgatgtacctgacatgctggaggcggcggaaagcatagggcggtatatggaagttatccaagatgttctgcgccattttacgctagctcaactcaaaacaaacccggaccatagcatgcttctgctagagctttttcaacagctgaagaaggatggcctgatccgtgatccggaaaaagccgcggtttgcctggctgagcgggagaaacaagggggattgggaatccccggaacaaacatggcgctttatcatctcaaaaatgatgaaatcgtcctgccttttttcaaaatgtttgatctcagcaccccctatgaagtggatggcatggacggaaataccctcaggatgacacgcattctcgtcatgatggcgcctggctcattatctgctgaaggctcggagattttaagcgcgatcagctcggcaattatcgagagcggagaaagcatggcggggtttcaggaagaaggaggacaagaattgtatcagcggttaaaccgcatatttttcacatggatgaaagaaaaaaacatactgtaaacctgcatggcacacgtcaaaaatttggcgtgtgtttttctgtggatggggaacaaaataagaaaatgtgggactattttatcattcagtattggaataattccaaaatgaaatagttttacaagttatcttttttgggttaaaatgggtgaggtaaggaagaaaatctaacaaattattgaagattcaagagaatataggagatgacgatatggaaacattacagcatctgattctgcatgacatgccgaatagcgaagaaatagaggctgtaaaaagcggagaccatacactgacatataaaggttaccgtaaacggattaatcagctggcgaatgccatgcttcaaaaaggaattcaaaagggcgaccgtgttgcattgctttgcaaaaacggccatcccgcctcaactgttatgttcgccgcacttgaaataggtgctgttgtcgtacctgtcagctggcagctgaaaccatatgaaatgacaggcattttaaaagcaagtgaaccaaaagcgatgttttacggagcggagtttaaagagatactggatgaagttcttcctgaattgtcctcactgtgtgtaacaatggaaacaggaacagcttacgaaacatctgctgaatttgaagcgctgtttgcaggtcctgatcatttgccagagacggaaatggtttcacctgatgatacagcacttctgatgtttacatctggaacaacgggaaacccgaaaagatgcatgattacacatggcggcatatacagatacgttaaaaaatccaacagctcaatagcacgtatgaagggccttcgttttctcgcgtgccatccgatttatcatacgagtgcgctcatttgcatcatgcttggaacgtttgcagaaacaacatttgtgtttacaaaggatcaagatcctgttcacatgctgaaggtcattgaagaagagaagattcagaccgtgatggctcttcctgtgttctacacgtatttgcttgaggcgtgggaaaagcaccaaactgacttatcttcgcttgttattttaatgacaggcggaacaaaagtgccgagcagcctaataagccgctatcttgatattggcattccgcttgcgcatggctatggaagtactgaggcttggggcatcagcacatggacgcctgatatgggaatggataaagcggcatctgcaggaaaacctgtggcaggtgttaaagtcaaagtggaagatcctctgaccggagaagaacttcctcaaggagaaatcggcgaaatcgttgttcatactccattcttatttaaaggctatgaagacaatcctgaagcaacagcgaaagtgctgcaaaatggatggtttagaaccggagattcaggatatgtagatgaagatggctttattttcatcacgggacgctacaaggatgtcattatttacggaggcgataacgtctatcctgatcaggttgaagaagttatccagcagatcccgggaatccttgaaacggctgtggtcggtattcctgacccgctttacggtgaaaaaccgaaagcttttatcgtgaaaaatggcggccagcgcatcacggaagaggatgtcatcgcattttgtaaagaacgcctgtccgcttacaaaatacctgaagttgaatttgttaacgaactgccgaaaaacaaccttggcaaggtgaaaaaagacgtcctgcgcaatcaggctgtacattcataaaagaagaagcccgtccactttatgtggcgggcttctttgcagttgcacagacggaaagctcaggcttaatgttcttaaattgtatatcaatgtcttcgaagccggctgctttaaagtcagcaatcatctgtcttccaaatgatttggttttctcaggactggcatccgcttcccgcggctgcatcgtaatggctgctttgccgcctggctttaatgcccgataaatctgttttatgccttttgtttggtcattccaaatggtgtagttgttaacggaaatcactttatcataaaacgaggcggggagaggaaatgtctcgatgcttccttgtatcaggcgtacgccctttggtttcactctgcgggcggccagcttcagcatggcctctgatacatcaatcccatgaagatgaacatccttctcgcgtttcagcatctgctgcatgcagtatcccgggccaaacccgacttctaaaatgctgtccccgcgcgtgatacccagctgattgattgtccactgattcagtgtttgattttcagcagccatgatgtacccggcaatcatgccgatgacgccctttggcctgctgaatcttctagaaagcatgttaatcattcagcaaccaaccccctttttgagttaatttcctctcagcgttccatgtgaaacatttttctgataaagcaatgcgaaggtgccaagccatgtttatccaaagagtgtgtgaggtacacaacaaatagacatgaaaacaaaggaggagaatcatcatggcaaattatccaaaagaactgccggcacaaactcaaagtcgccagccgggaattgaaagcgaaatgaatccaagtccggtgtatgagtacgaggattataaaggagcagacaaattaaaaggaaaagtagctcttattacaggcggcgacagcgggatcggacgcgcggtttccgtcgcttacgcaaaggaaggcgcagacatcgccattgtgtataaggatgagcatgaagacgctgaggagacgaagaaacgtgttgaacaagaaggcgtaaaatgcctgctgattgctggtgacgtaggtgaagaggaattctgcaatgaagcggttgaaaaaacggtcaaggaactaggcggccttgacatccttgtcaacaatgcaggtgaacagcacccgaaggaaagcatcaaagatattacgagcgaacagcttcaccgcacattcaaaacaaatttttattctcaattttatttgactaaaaaagcaattgattacctgaaaccgggcagcgccatcatcaatacgacatccatcaacccgtacgtagggaacccgacactgattgattatacagcgacaaaaggggcgatcaatgcctttacaagaacaatggcgcaggcgcttgtcaaagacggcatccgtgtaaatgcagtcgcgccgggtccaatttggacgccactaatcccagctacgttccctgaagaaacagttgctcaatttgggcaagatacgccgatgggccgtcctggacagcctgttgagcacgtcggctgttatgtgcttctggcatcagatgagtcctcttacatgacaggtcagaccctgcatgtcaacggcggaaactttgtgacgacataagagggagtgagacatatgggcatcacgaaagaagaagtgaacagctactatcaaaaagcagggattgtattaacggacgaggaagtagaccaaatccagctgatggattacggcttaggaaaagaaagaaaagtcgggctccagctcttcgtctacgtcaatacagaccgttattgttcaaaggaattggtgctgtttccgggacagacttgcccggaacaccgccatccaccggtcgacggccaggaaggcaagcaggagaccttccgctgccgctacggaaaagtgtatctttacgtagaaggagaaaaaacgccgcttccaaaagttctccctcctcaggaagacagagaacactatacggtctggcacgaaattgagctagaaccgggcgggcaatacacgattccaccaaacacaaagcattggttccaggccggggaagaaggtgccgtcgtgacggaaatgtcatcgacgagcacggataaacatgatatctttaccgatccaagaatataaggatgggcttaacagcccatcctttttgtattgaaaaaaacagaatcatcgctataatgggtaaaaaaggaaagagggcgaggcaatgttcacttgcaaggtaaatgagcacatcaccatccgattattggagccgaaggatgcggagcggctggccgaactcattatccaaaatcagcagcggcttggcaagtggctgttttttgcggaaaatccaagcagcgctgacacgtaccgagaaacaatcattccagattggcggcgccagtatgccgacctgaacggcattgaggcgggtctcctttatgacggcagcctatgcggcatgatcagcctgcataaccttgatcaagtgaatcgtaaggcggaaatcggatattggattgccaaagaatttgaagggaaaggcattattacagctgcctgccgaaaactcattacgtatgcttttgaagagcttgagctgaatcgtgtggcgatctgtgcggctgtcggaaacgaaaaaagcagagcggttccggagcggatcgggtttctagaggaaggaaaggcacgggatggcttatacgtaaacggcatgcatcacgacctcgtctactacagtctgttaaagcgtgaatgggaaggcgaaaaataaagagcacactttcttgtttaaatcttccccggatgtggaaaagtaacagcggagacgttaaaaaggagtgattcgagatgaatcagcaagacattaaacaaaaagtgcttgatgttctagatcaccataaagtaggttcgctcgcaacagttcaaaagggcaaaccgcattcccgctacatgacttttttccatgacgggctgacgatttacacaccgacaagcaaggaaactcataaagcggaagaaattgagaacaaccccaatgtccacattttattaggctatgattgtgaaggttttggcgacgcatatgtcgaagttgccggaaaagcaaagatcaacaattcggcagaactcaaggacaaaatatggagttccaaattagagcgctggtttgacggcaaggatgatccgaatctggtgattcttgaaattgaaccggaggatatcagattaatgaatgccggggagaaaacaccggtctcactcgaactataaaaaatttgtgttttcaggggcgatatgttattatgaatagctagtaagaaaaataagcaaataaaaaagaaagtaaacttcttttttctgttttgagagagaagcttaccgcttcccaagcagcataaccagctgcccttattcttttccttcataacaaatcgcccctaacgatgagatggaaaaaagacttttttgttttacaattcacaccggcgcggcttcggagccgcagtgacgattgagaggtagggctttcgttgtcttgtgttcaagaaatttccatggtgtttactttccagaatgattcttcggaacaatgctttatgaatctaacccgcctgacttggcggatgatataatctttatttgcgtatagaaaagaataagacaaaccgcccggcgtacgccggacggtttttttattgcaaaaaacacatcgtactgaaacctccttgtcttctttccagtcttatctctaggatgaaattggaggaagaataacgtgcatgtcattacaacacaagtactttttattttttgttttttattgctgattcactcgatagaaaccttagcctatgcgacaaggctttccggagctcgcgttggatttattgcgtccgcgctttctctgtttaatgtcatggtcatcgtatccagaatgtcgaatatggtgcagcagccctttactgggcatttaattgatgatgctggaaaaaacgcactggcgattgtaggggagcagttccgctttttaattttcggatcgacagtcggcaccattttgggcattatcctgctcccgtcttttgtcgctcttttttcacgggcgattattcacttggcgggcggcggcggctccgtttttcaagtattccgaaagggattctcgaaacaaggattcaaaaatgccctttcctatttgcgtctgccgtccatttcatatgtaaaaggatttcatatgcgcttgattccgaagcgtttgtttgtcatcaacatgctgatcacatcgatttatacgattggtgtgctttcggctttatacgcaggccttttggcgccggagcgcagcacgacagccgtcatggcttcgggtttgatcaacggaattgcaacgatgctgctggctatttttgttgatcctaaggtatccgttcttgctgatgatgtggcaaaaggaaaacgaagctatatctatttaaaatggacctctgtcacaatggtcacatcaagggtggcgggcacactcctcgcccagctcatgtttattcccggggcctactatatcgcgtggctgacaaagtggttttaataagaaaggctggatcataaagatccagcctttttgcgcttccttatttatagttccttaatccgcggtcgtacaaaaaatttccgaatgggacgaaagcggcgatgaagccggcagctgaccatttcagcggccatttgacagagaaggttgcataagccaagacaagcaaatacaaaatgaacaacccgccgtgaaccgaaccgacaattgtcaccgcaagcggaaggcctgcccaatatttaagcggcatagcgatgaacaacaggattaagagtgacattccttcaataaaacccatcgtgcgaagtcttccgatcggcgtgtgcagcataaatcgccctccttgtggacacgttttcattttatactataaacaatccgggggggcatatgacagctttcaaaaaatgttcggaaaacattcatttttacatgccttttctagggaactgtacttgtcatttacaaaaatacccgagataatgtgtacaaaatcaaaaaagaaggatgttgaaatgaaacttgaccagattgatctgaatatcattgaggagctgaagaaggacagccgtttgtcgatgagggaattaggcagaaaaattaagctgtcgcctccatctgtaacagaacgggtaagacagcttgaatcgtttggcatcatcaagcaatacacgctggaggtcgaccagaaaaaactggggcttcccgtttcctgcattgtggaagcaaccgttaaaaacgcggattatgagcggttcaaaagctatattcaaacattgccgaatattgaattttgctaccggattgcgggtgcagcctgctatatgctgaaaatcaatgccgaaagcctcgaagcggtagaagatttcattaacaaaacatcgccctacgcgcaaaccgtcactcacgtcattttctcagaaattgacacgaaaaacgggcgcggttagagagtgccgcgcgaagtctgttataataacaggatgagcgtgaaagaaagagaagtgatcaagcatgtcaaaaacagttgtattagctgaaaaaccttcagtcggccgggatttagcccgggtactgaagtgccataaaaaaggaaacggttatctcgaaggcgatcaatatattgtgacttgggctttaggccatttggtgacgcttgctgatccggaaggctacggaaaagaatttcaatcatggcgcctagaggatctgccgattatcccagaacccttgaagcttgtggtgataaaaaaaaccggaaagcagttcaatgcagtcaaatcccagcttacccgtaaagacgtcaatcagattgtcatcgcgactgacgcaggccgggaaggtgagcttgttgcgcgctggatcattgagaaagcgaatgtccgaaaaccaatcaagcggctgtggatttcatctgtgacggataaagcgatcaaggaaggttttcaaaagctgcgcagcggcaaagaatatgaaaacctgtaccattctgccgtcgccagagcggaagcggattggattgtggggatcaacgccacccgtgcacttaccacaaaattcaatgcccagctctcatgcgggcgtgtgcagactccgacgcttgccatgattgcaaagcgcgaggcagacattcaggcgtttacgcccgttccgtattacggcatacgtgctgcagtcgacggcatgacgctgacgtggcaggataagaaatcaaagcagacgagaacgttcaatcaagatgtaacaagccgtttgctaaaaaatctccaaggaaagcaagcggtcgtagctgagctgaaaaaaacagcgaaaaaaagctttgcgcctgcgctttatgatttaacggagctccagcgtgacgcccacaagcgcttcggtttttctgccaaagaaacgctttctgtcctgcagaagctatatgagcagcataagctcgtcacatatccgcggacggactctagatttttatccagtgacatcgtcccgacgttaaaagaccgtctggaaggcatggaagtaaaaccgtatgcccaatatgtcagccaaattaaaaaacgcggcattaaatctcataaaggatatgtcaatgacgcgaaggtgtcagaccaccacgcgattatcccgaccgaagagccgctcgttctcagcagtctgagtgataaagaacgaaagctgtatgacctgattgcgaaacgtttcctggctgtattaatgcctgcattcgaatatgaggaaacaaaggtcatcgcagaaatcggcggagaaacctttacggcgaaaggcaaaaccgtgcagtcgcaagggtggaaagccgtttatgatatggcggaagaggatgatgagcaggaggatgacagagatcagacacttcctgcgcttcaaaaaggcgacacacttgccgtccgcacgttaacggaaacaagcggccaaacgaagccgcctgcccgctttaatgaagggaccttgctgtcagcgatggaaaacccaagcgcgtttatgcagggagaagaaaaaggcctcgtcaaaacgcttggagaaacaggcggcctcggcacggtggcaacgcgtgccgacattattgaaaaactgttcaacagctttttaatcgagaaaaaaggccaagatatttttatcacatctaaaggaaaacagctcctgcagcttgttccggaggatctgaaatcaccggccttaacagcagaatgggagcaaaagctgtctgcgatcgcggccggcaaattgaaatcggctgtttttattaaagatatgaaggcttacgctcaccaaacggtaaaagaaatcaaaaacagcagccaaaccttccgacatgacaacattacgggaacggcatgtccggaatgcggcaaaatgatgctgaaagtaaacggcaaacgcgggacgatgctcgtgtgccaagatcgtgaatgcggaagcagaaaaacgattgcccgaaaaacaaacgcacgctgcccaaattgccataaaagaatggagcttcgcggccaaggcgagggccaaacctttgcgtgtgtgtgcggtcaccgtgaaaagctctctgtatttgaaaaacgaaaaaacaaagacaaagcgcgtgctaccaaacgggacgtatcctcttatatgaaaaaacaaaataaagatgagccgattaacaacgcgctggcagaacagctgaaaaaactcggtttggataaataataaaaaaacctgtgcctatcgcacaggttttttattggacttaggtcctgttttcttaatgttcaaaaagggaaaaaaaagctagcaatctgcattttttttcttttatagtaaatgtactttgtaacatggcagtcatattttcgtctataactatttgtgagcgtctgatttgcttcaggcgacaaagggggatttgcctgtgaggcatgtactaattgctgtcatcttattcttcttatctatcggactttccgcagggtgtgctgaagctggaaacaagacccaaaatcagtcggcgacagaagtgaatgccagcccgctccagccggcggaatatttcatctatcacaatttaatgaatgacaaagggctgatcaaaaccgatttttcagaccagccttcttacttgtcggaatctctcggactgtggatggagtttctgctcagcaaaaatgacgcaccacatttccaggatcaatatcagcatctgactgattcatttctgatgagcaatcacttggtgacgtggaagattcaaaatggccaagcgagcgggacgaatgcgctgatagatgatatgagaattatgctgtctcttgaccaagccgccgcaaaatggggccgcagcgactacgcgcaaacggctagggatatcggcacgtctttgaagacatacaatatgaacaacgggttttttacagacttttacgactcacaggccgcttcaaaggatgtgacgctttcatacgtcatgcctgatgccttagctgtcttaaagaagaatggaatcatagacgaagaaacagaacagcggaatgccaatgttctctattcagctcctttaaaaaatggctttctgccgaagacatacagctcggagacgaaggaatacacatatgatagtgaaatcaacctgattgatcagctttacgctgcttggcatttgccggaaggggatgaaaaagcatctgttttagcggactggatcaagcaggaatttcagaaaaacggaaagctgtacgggcggtattcggcatatacgaaggagcctgccgtccaatatgagtctccatccgtatatgccttagccgtattgtttttgacaaaacagcatgaaaacagttctgtcatcaaagccatatatgatagaatgaatgactttgaaattcatgatccggtgaaatcgtattatggaggctatatgagcggcactcagacgcattcatttgacaatctgctgccgctgttagccgaaaggaagctttttaatgaaaatatcattcagtgaatcacaaaaattatttgcttatttttcagggctcatcgcggccctgtctttgtttatttattatgtgtcagcccagcaatcagaaggtgctctgatcctttgcatcacatttggcgtcatcgccgcaggcatctggttcggcccgatttacgcgctggcagtgaccttaatcgtactctttgttctcggcaccttaatgatgtttttccagactggacagacatcgctctttccggctgaggaagggctgcgaatgcttgtcgtgtggggaatcgcgcttttgctgttttcttttatttctggaagaatccacgatattacagcagagcttcggcgctcaatgacacggcttcaatccgaaattaaaagctatgttgctgttgacagagtgactggttttgataacaagcaaaggatgaagctggaactttcagaagaaatcaagcgggcggagcgctacggcaattcttttgtgtttttgctgctccatatgcattatttcaaagagtttaagtctttgtacggtgaaaaagaaacggaccgcctcttccaatatgtcggtcagcaaatcaggacaagcgttcgggaaacggataagaaattccgtccctctgacgagcgtatcgggatcgtgctgacgcacacgcctgctgaacatatgccggccgttctgactaagctgaagaaacaattggatacatatcagctggaaaatggaaagtatgtgtcgcttacgttccacgtttgctatttgccctaccgcaacgatatccaaacagctgatcaatttttagaagaactggaaaacgagatgatgatgaatgaactataaaggaatcacattgctatgcgtcatgatgcttctattttcagctattgcgtcttttcccgtttctgcgcaagcgaaagatcaggatgccggcattctcatcatctactcaaccttggacggcaaagagtcgtcacaagtcaaaatgctcgatttgcttgcgggccactttacatcccatgtgacagtcaaaaaagattcagacgttgaagcgtcggatttcaaagggaaagaccatgtgatttattacggccaaacgaaaagaaagctcagccaaaaattgctgtctcttatcagcggcgtgaaaaaaccggttgtcgccattggctataacgcaggccaaatcagccaattttctgggctttcattagcccgcaaagaaaatgtgtttcaggttcacagcaggtcagaaaaggccgatgtgtctctggaaagcgggcttaacgtgctgagtgtatcaggcctgaaaggaacggcgctttacaccttcaaagcggatgaaggcacaacgcattcttttatatggaaaacaaaaaaagggaatgtgtacattggattaacaaatttgttaaatgacaatttgatcgtggcgaaacagctcagagaagctttcggagagaaggcggggacgacgttattgtatttgcgtctcgaggatatcagcccgatgtctgatgaaaaactgctgcttcaagccggtacatacctgcataagcggcatattccttttatcctggcggtcattccggtttacttgaatccggaaacaggcgacaaagtgtatttgtctaatcaaccgaagatggtcaaggtgctgaagaagctgcaaagcatgggcggcagtatcatagttcacggctatactcacgcttatcgctacagtgaaacaggagagggatttgaattttgggatgcaaaggcggatcagccgattacatccggaaatgccgaagaccccccgtccattttggagaaagaacaggacttcccgaacgaacaagcctatcacagctatcttgaaccatttcgggaaaaggaagaaacgtatacaaaacaaaaactgacgcgtgccattgaggatttgacatcatcgggtctttacccgctggcgtttgaagcgccgcattacacgatgtccgaatatggctatcaaatcgcctcgcagtattttacaagcattttcggccaggtccagctcagcagcacaacatggaaaacatccggtgcacctccgtttgtgactgctccttcgatgctgcacggaatgacgctttatccggaaacgatcggctttgtcgacacatcgaagcaaaacccgctcggtgagatggaggagcatatctcccagatgattgattttgaaggcggagtagccggaggattttatcacccgtaccttgggatgaaatatctgcctgagctggttgatcagatggaacgcattccagacagtgaatggcttgatttaaagaaaacgaaacaaaccgtcaaaacagacaaagtggaaattcatacaagcggtgacggaacgattcaggtgaaaaacggcgtaagccccatttacgagtttttcgatcatcaccggcaaacccctctggaaaaggcgttatggattctctccgctgttgtgctcttatttgtcatcatgtttgtcagttatacgttttacttgagagccacattgaaaaaacgaatttttaaggagagaagaagccttgggtaatacgctgttctttatctcgctaagtttaatatgggttatgcttctctaccacatgttcctcatgcagggcgggtttcgccactatatgaccttcgaacggaatatcccgaagtggagagaaaatatgaaggaactgccgaaggtcagcgtcctcatcccggcgcataacgaagaggttgtgattcggcagacgctgaaggccatggtcaacctttattatccgaaggaccggctggagattatcgtcgttaatgataattcatcagaccggacgggtgatatcgtcaatgaattttccgagaaatacgatttcatcaaaatggtgattacgaagccgccaaatgcaggaaaaggaaaatcctctgcacttaactcgggttttgccgaatcgaacggcgatgtgatctgtgtgtatgacgccgacaacacgcctgagaaaatggccgtgtattacctcgtgctcggcctgatgaatgacgaaaaggcaggcgccgtggtagggaaattccgcgtcatcaatgcggcaaagacgctgctgacgaggtttattaatatcgaaacgatctgttttcagtggatggcccagggaggcagatggaagtggttcaaaatcgccacgatcccaggcaccaacttcgcgatccgcagaagcattatcgaaaagctcggaggctgggatgacaaagcgctcgctgaggatactgagctgaccatccgggtatataatctcggctatcacatccgctttttccctgccgccatcacgtgggagcaggaaccggaaacatggaaggtatggtggcgccagcgcacccgatgggcgcgcggcaatcaatatgtcgtgctcaaatttttggcgcagttttttaagctgaaacgaaaacggattatctttgatttgttttattttttctttacgtacttcctgtttttctttggcgtgatcatgtcaaatgcgatttttgtagtgaatttgttttatgatttgcatttgtctgttggatttttggcaatgattctctggattttggcgtttttcttatttatgacagaggtcatgattacgttgagcattgaaaaaacagaaatgaacaagcaaaacttttttatcgtatttctcatgtacttcacatactcgcaggcatggattgtgcttgttatctactctttattcgtagaaatcaagcaccgtttattcaagcaagaggtcaaatggtacaagacagaacgatacaatcaacataaaagcgggtgacctttttgaaacaaataatgatttttctcacaagcttcatgctgctggcgatgactggacaaacggctcttgccaaagacgtacaggtcagcggttcgctccttgggaaaagcagccaagaacaagccaaacagcaggtgctgacaagcgagctgattacactgtatggatcaaaagacagcgcagagctgacgtatcagatcccggcaggcgcctcttcgggcaatcagcaattggtaatcgaatacgaggcatcaaatcttttaatttctccatcatcgttaacggttgtcattgatgatgaaccggtcaagacgttaaagcttgatggtgattccaaacggaaaacagtgaagctgaatctgaataaaagccagtctgcgcaaggctatcacaacgtatcgctgaaattctacggcgtaatgaaagagggcgtgtgcgtcagacaggatacatcaggcaactggatcaaaatttatccggacagccggctgacacttgctgacagcagtgaagcgaagggaacgtcgctggaccattatccgtatcctttcgcccaatctggaaatacagcggaagaaacagctatcgtcattccggataacccaagttcagcagaaatagaagctgctgttaaaacagaaggctatttgaaaacggtggacagcagtgtcagtattgcgtatgtcacggaatctgaactgaaaaaaatcgataagccgacgattgttatcggcgtggacaagcattggaacggcaaagtgaaaaaactgttgaaacaagccgggctacaggcaaaaggagaaaaccttctgcttgcggagcgggtgctgaaagcagagggcaaacagcagccggttctgtttgcgcaagcggcgtccgaggacgcgctcacaaaaaaaatcagcgtgatgacagatcagacatatacaggccagctcagcggcgatacactttcaatcagcaagcttcagcagactgaaaaaaaagaaagcgataagctgacccttgagaattttggagcgggtgatatcacaattggagccgacaaaacatcttcagcacattatttttatccggcttcggctgttttagatgaaaaccaatcggcgaagctgtcgcttaaactgaaaaagtctgaaacgattcaagcctcaacggctgaaaacgagtcagcctctcaggctgcagaactgaaagtgatgatcaacggccagccgcactcggtccggcttgatgaattaggaaaagaagataaaaacggattctatcatgtcacagtgaaagtggaccctaagctgctgcaaaaaaaccgctacattgatattcagttcgtcacgaccggtttaaaggaaaacaacccttgtaacaccactgatgaagaaaagtgggtttttatcgataaaaacagtacattatcatacgccatcaaaggcatgtccccgtcagcggattttcaagagtggccgctgccttacgccggaaaccaggatcaaacaacgttaatcgtgcttcctgacaccgtaagccaatcgaagctagaggagctttctctcgtaacagaatcctttggcaacgaagcacagcattcatatacggtaaagaaatcatctgacgttacagcaaatgatgcgaaaggacgaaacctcattttcataggagggatcaatcaattttctcttctgaaggagaaatcatcagatctgcttgtgccgcaggaaaagaacggctcgtttgatgtatctagtttcgagatgctgaatgagacgacaaaacaagtggtatttacccaagcatcggtttgggattcacgctatacaatggctgtctttgcaccgtcaaaaggagatggcacggctgtcacaaaagagatcatcagttatctgaacagcaacgatgagtcggcaaccgtccttaatgaaacaaacagccagcaggtgtttacaaaccaccagcagctcaaatcggaaacaaacagttccgatgcagaacaaccaacacaggatcatagccagaaatggatgtatattggtgtgctggcactcattatggtggttgcggcagtgttcatttggattgccgtaagacgcaaaaaaagaaagacagatacagaataaaacagaggcgattttagcctctgtttttttatttttggtaagtaaattccatttgtggaacctgtcattttatttttttctctcagccaataagcctctttacaacgtgcgggaacgggagtatgatctcttttagaaaacaaatcgcttaatctgaaatcagagcgggggacccaatagaacggctttttgccgttggggtgaatcctttttaggtagggctaactctcatatgcccgaatccgtcagctaacctcgtaagcgttcgtgagaggagatgaatgaaacctgtgttcgatgttatggcacaggggcatccgtttgcctctgtgttttttgttgttcatttttgaatgcaaatcgcatacagagacatcatagcagaaaggactatcatcaacatgtgagagcaagacactgatggatgttttattgttttaattgaaaaatgagaaattaaaaggggaagacatcgatgtatcattcaatcaaacgttttttgattgggaaaccactaaaatcccaagcagctggagagcaaaaactgacgaaattaaaagccttggctatgctttcctcagatgcgctgtcatctgtcgcatatgggacagaacaaattctaatcattttggcaacaatcagtgcagccgcattttggtactccattccgattgcggttggcgttctcatcttgctgctcgcactgattctttcatacaggcaaattatttacgcttatccgcagggcggcggggcgtatatcgtttctaaagaaaatctcggtgaaaaaccgggattgattgcgggcggttcattgcttgttgattatattttaacagtagcggtaagtatttccgcaggcacggatgccatcacgtcagcctttcctgcattgcatgattatcatgtgccgatcgctatttttctcgtgttagtgattatgattttgaacctgcgcgggctttcggaatcagcatccatacttgcctacccggtttatctgtttgtggtggcgcttttggttctcattgcagtcgggttgtttaaacttatgacaggacaaatagaccagccagcccatcatacatcgctcggcacacctgtagccggcattacgctatttttgctgcttaaggctttttcctccggatgctcagcgttgaccggggttgaggccatttctaatgcgattcctgcattcaaaaacccgcctgcgcgaaacgcggcaagaacgcttgcgatgatggggattttgctggcgattctgttttccggcatcacggttctcgcgtacgggtatggtacggcgccgaaacctgatgaaacagtggtttcacaaattgcgtccgaaacctttgggcggaatgtgttctactatgtcatccaaggtgtcacatcgcttattttggttcttgcggcaaatacgggattctcagccttcccgcagcttgccttcaacctggcgagagaccagtatatgccgcgaatgtttacagtcaggggcgaccgcttaggcttctcaaatgggattatctttttaggctttgcctccattgttctcattatcttattcgggggacagacggagcacttaatcccgttatatgctgtgggcgtatttattccatttacgctttcacaaaccggcatgtgcatgaaatggatcaagcaaaaaccaaaaggctggatcggaaaaatgctgatcaactcctgcggcgctctgatatcatttatggttctatccattctgtttgtgacgaagtttaatgtcgtatggcctgtgttaatctttatgcctatcgtcgttttgctgttttttgcgattaaaaatcactatactgcggttggtgaacagcttcgcatcgtagacaaagagccggaagaaatcaaaggcaccgttgtgattgtgcctgtggccggtgtcaccaccgtcgtgcaaaaatcgattcactatgcgaaatcactgtccgatcaggtgatcgccgttcacgtgtcatttgacagagaacaggaaaagaaattcgaaaaacgttgggaagagcttaataacggagtgcgtctcgtgacgcttcactcctcttacagaagccttgtccatccgtttgataagtttttggaaacagttgaggcaaaagcgaagaaggagcagttttccgttatggtgctgtttccgcaatttataacgaaaaaacgctggcacaccatccttcacaaccaatcggccttcctcctcagagtccggctgttctggaaaaaggacataatggttgccacactgccgtatcattttaaaaagtaaagctctaggaccaagggaatcaccttggtcctttttagcgggaaaaggaggtatgggggtgtatacacaaggtgcttttgtgatcgtattgaacgaaagtcagcaaattctgctggtgaaacgaaaagatgtccctctatgggatttgccgggcggcagggttgatcccggggaatcggctgaggaagcggcagtgcgggagatattggaagaaacgggatacaatgcagcgctttctgcgaaaataggtgtttaccaaaggccaaagtttcaagatgaacagcatctgtttttcggaagcattacaggcggacaagcaatggctgacggcacagagacagcgggattaaagtgggtttccccggggcgtttgccgctttttatggtgccgaatcgaaaaaggcagatcaatgatttcaagaacggcgctcaagatgtaaatgtcaccgtcaaggatagcgggttgctcgcggcgatcgacctgttgaaaagaagactgggcaagtgattcaggtctccgggttttaaagcctttctcctgtggtattgaaaaaaggaaaaaggaggatacgttatggcacacaaaactgcaggacaagcaatgacagagctgcttgagcaatggggagttgatcatgtatacggcatccccggagacagtataaatgagtttatcgaagaattaagacacgaaagaaatcaactgaagttcattcaaacccgccacgaagaggtagcggcactggcagccgcggctgaagcaaaactcaccggcaagatcggagtctgtctgtcaatcgcagggccgggagcggtgcacttattaaatggtttatatgatgctaaagccgacggcgcccctgtgctggcgattgcaggacaggtttcttctggcgaagtcggacgggactatttccaggagattaagctggagcaaatgtttgaggacgtggccgtgttcaacagagaggtacatagcgcggaatcacttccggatctcttaaatcaggcgatcaggaccgcctacagcaaaaaaggcgttgcggtattgagcgtgtcagatgatttgtttgcggagaaaatcaaacgggagcccgtgtatacttcaccggtgtatattgaagggaacctagaaccgaaaaaagaacagctcgtcacctgcgcccaatatattaataacgctaagaaaccgattatcctggcagggcagggaatgaaaaaggcgaaacgggagctcttagaatttgcggacaaagccgccgctccgatcgttgttacactcccggcaaagggtgttgttcccgataagcacccacattttctcggcaacctcggtcagatcggaacaaagccggcttacgaggcaatggaggaatgtgatttattaatcatgctcggaacgtcattcccgtaccgtgattatttgcctgatgacacgccggcgatacagctcgattcagacccggcaaaaatcggaaaacggtatccggtgacagcgggccttgtctgtgattcggctctcggtttgcgcgaattgacagagtatattgaacgcaaggaagacagaagattcctgaatgcctgcacagaacatatgcagcattggtggaacgaaattgaaaaagatgagacagaggcaacaacaccgcttaaacctcagcaggtcgtggcccgtcttcaggaagcggcagccgatgatgcggtgctctctgtagatgtcggcactgtgacagtctggatggcgcgtcatttcaaaatgaacgcgaatcaggatttcatcgtttccagctggcttgcgacaatgggctgcggcctgccgggagcgattgcagcgagcttgtccgaaccggaacgccaggcgatcgccgtctgcggtgacgggggattttccatggtcatgcaggaccttccgaccgccgttaaatataagctcccgatcacagtcgttattttaaacaacgaaaatctcggcatgattgagtacgagcagcaggtcaaaggcaatatcgactatgtcacaaaacttcaaaatgtcgactatgccgcatttgcagaaagctgcggagcaaagggcatcaaagtgaccaaagcggaagagcttgcgccggcttttcatgaggcgctgcactctgaccaaccggtcgtagtggatgtcatgattggaaacgaaccgccgcttcctggcaaaatcacctacgggcaggcgaaaggctttagcaagtacatgctgaaaaacttcttcgaaaaccaaaaatttgaaatgccgtcactgaagaaaagtttgaaacggttattttaaaaaaacaggggccctaagagcccttgtttttttttttttttttggaaacaaatgtattttcagcatgtttgaattcataaaatgatcggtatatgtattaggaactgatttcgccatactcgaaacagacaaaaggacaaatgcatcttgtttcaaaggaagatgcatttgtccttgcatgcttattcttatcaaatcttacagaactcttctcataataggttatttttcttttttcttcagcccgaagaagaaaggaaaagcagaaccgaccaagaaggtgccgaataaaaacatgccgccgataaacacgtggaaatttgtgtgtccggccgtaaacgccgtgattagggaaatgatactgagcacgatcatggcaatgccgggcgcgactctcatttttcccttggatttatgggcagcaacagaacataaaatgccgataacaataggaacaatccacaaataaaacagaataaatactgacatcatcaaaactccgatttttcttctatcataacaaatttctgtcaaaaagggtatcaatgagcttttgcggaaaaataaaaaccggctttagaagccggtttttttatcgaaacgtatctacaattaaaaacacattcaaagcaacgatcaatacagcaatcagccaagacaccactgtgatccatttggcgttgatcagagatcccatgatccgtttattgcttgtaaacataataagcggaatgagggcaaaggcgatcccgaaggacagcacgacctggctcagtacgagagcggtcgtcggattaacacctgacgcgatgatcaagatcggcggaatgatcgtgataaaacgccgtacatacagcggaatgcggtagttgataaatccttgcataatcacgtcgcctgaaagtgtgccgacagacgaactggatagaccggcaacgagcagcccgatcccgaacaaagccgcagacatagggctgacaagatgtccgaattgctgaaatgcgacgtcgagatcctcaacaaacaggccgtttttgaagaataatgcggcagccacaatcagcatacttgcattaatagcccctgcaatcagcatcgctattaaaatatcaataaattcaaacctaaagatttttttccgttctgcatcagttttgccaaccacccgccgctgtgtaagggcagagtgtaaataaatggcgtgcggcataacagttgcgccaagaatacccgctgcaagaagcacactgtcggtgccatgaaacgccgggacaaaaaggcccttcatcactgacacggcatcaggctttgcgaaaaaggtctgcaacgcaaaggcgatcacgaccacaaacagcataccggcaatacctgcttcaagtgagcgataaccacggcgctgaagctccaatatcgcgaaagaaccgatcgccgcaataatagacgcttcaagcatcggaatgccgaacagcaaatacagtcccagagccgctccgataaattccgccagatcagttgcgataatgaccaactcgccctgaatccataatccgatcgagacaggcttcgggaattcttcacgggcaacctcaggcagatttttgcctgtcgcaataccgagtttggcggatagggattgaattaaaagcgccatgatattggaaaataagatcacccataagagcatatatccgtatttagaacccgccgaaatattcgttgcgaagttgccgggatcaatataggcaatggctgctataaatgcagggccgagaaaagggagcagccctctgaatcctctgattttcccgtcaagcgcatcttggacggctttggaacggggagattgtgctgtgatgtccttgttcatcatgtctcacctgaattctgtttgtttttgccgtacaacaaagagtttccttaaggcaaattattttatctacatcatatgaccatcccggtttcttgtcaaccgaaaatgttcaaaatacacttctgaatttttccctgttatgtaacatgatatgtagggattcgtgataaggtcccatataaaaagacatcgtttcatttcgaaacgatgcctcctgtatctaatgagtctaggcttccttccgcagcccgcggaatataaggcccagcaagaacacgaagatggctgccccgatgatggccgggaaaatagcaaagccggcgaggctcggtccccatgtgccaagaagtccgtgcccaatccaagcgccgatcagcccggcaatcatagagccgaaaattcctcccggcagccggtttcctacaatggcgctcccaattaatccgataacaattgcaacaactaatgaaaccaaaaagctaagcatcatgatcacctctcataaatgatttaccaatcaataaccgctcctgatcatttcgaaacacttgaaagcatattcctttatgatcctgttttaatctttctctgcacactgccgtcagctaaatgaacaatgacctcagtgcctttatgcgccgcgatttcctttgcccgttcaatcgcttctttctttgtatccttgatttcagacacacgtttggcgccctcggctttgactgcccagccttttttatgcttaataacatgctctgctttattcatgagctcggggccgctgccgctgcttggatcagcatcgcgttctgtctcatcatcatgcgtcaggaaatcatcaatttcatctgtagaggcgttttccgcccattccttcgctttgcttgtcgcaattggaatcgcgcgcccttcctcatagccttcatcaatcatcgcattcgcaatgtctatcgccttttttctcaccggcttctcaagattttttaatgaagcaggataatccttcatcgaccaaggcatgtctatcactccttttccttttataaaaatggtacccgcaggtgaaaaataaaaacgcatccgaaaaaatgaaggtatactatatagtagaaaaaacggaagggaagtgcgggttgggtgccaacagaacgaaaagaagacttacatcagcaattaaaagagatagagaaatgggaaaaagatcagcaaaaagtctggttttgggaaaagctcagccgtctcccgtttcaactcctggacaagctgacaccagaattcatccagaaaaagatcggcaagctcttggatgaggtcggcagctttgttcaaacaggcggacagtacctgacatctgaaaaacagattatcaggatgtttcaaaagaaactgccggaggagatctttgaatcgctggaggacatccggaaagcgcctcttcctgtcatggatgaaattgcggaaggaatgggcaaaaacagaaccaacgcagcaaccgttcaaggcgcgacaaccggtgtgggcggcgtgtttacgctggcggcagacattccggcagtgcttggcttatcactaaaaacattacaggatatcgcagtcgcatacggctatgacccaaaggagaaaaaagaacgagtcttcattgtgaaatgcctgcagcttacgtcggctgatgttgtcggcaaaagatcgattttgcaggaattaaaacactacgatcaagaccgtacatataagaatgtcgcttctcaaatccaaggctggcgagaagtcgttttgggctatcgagacacgtttggctggaaaaaacttttccagatagtgccggttgccggaatggtttttggcgccgctgccaatcgctcaacattaaacgacattaccgagacaggcatgatgctgtacaaaaagaggcgcattcttgaacgactgaaagaaacagaacgagagatggaatagcagaaagcagacggacaccgcgatccgcctgctttttttagtggaaacatacccaatgtgttttgtttgtttaaaagaattgtgagcgggaatacaacaaccaacaccaattaaaggaggaattcaaaatggcagacaataacaaaatgagcagagaagaagcaggtagaaaaggcggagaaacaacaagcaagaaccatgacaaagaattctatcaagagattggtcaaaaaggcggagaagccactagcaaaaaccatgacaaagaattctatcaggaaatcggcgaaaaaggcggagaagccactagcaagaaccatgacaaagagttctatcaagaaatcggtgaaaaaggcggagaagccactagcgaaaatcatgacaaagaattctatcaagaaatcggccgaaaaggcggagaggcaacaagcaaaaatcatgataaagaattctaccaagaaattggctcaaaaggcggaaacgcccgcaacaacgactaatcaaaagcataaaggcagacaacctgtaaataaaaaagcgatccggcacatcagctggatcgcttttttttggaatcttctcaatttatgccgctattgagatacaataagtgaaaaaggggttttcgctaatgtccaagatgcaaaacttgctcgccatcgcaaatgaagtcaaagaaaagcacgccaatttttcaatctcagaggtcaacgaccactgcgtgcgccttgcggtgtttacgggagaatatgactggcaccatcaccctgactcagacgaattgtttattgttcttgaaggggagctgctgatcgattttaaggacaaagaaaccgcggtgctcaaagcaaatgacagcctgctgatccctaaaggcacggttcaccgcacacgctcttacgtcagaacggtaaatctctgtgtggagcataaacaagccgaaaccgtcatcatagaggagcagccatgctaatcaaaaagatgatatgtgaagtagatgctgcaaacgctgaagcatttgcaaaagcgcagtcacagtgggaagcgttatcgcatataagcggctttatcaaacaggccggcggctggcgaaaaacgatagacgagccgctcaccgcagaaatcatcagtgtatgggaaaacagagaagcctatgatcattttatggagaacgaacatgacagcatatacgaggaaaacgatcagaaggctgtaattctttcgatagaggtgacggtgtacgaagaggataaaccgttcgttcacgatctgttacataaccccgatatccggtacgaaccaaactggacggttctgaaggcataatcaaagcccaaaacatcatgttttgggcttgtctctttactcgcgtcccggaagtgtattatgaacaaaaggcggtgctggttttaactccggtttttctccaaacgtttttgcttctttcacatattcaaaggcttctccgtccggcgctttttcattcagccagttttgctcggcgcttacttcgccttcagagaaattgataagctgatgtgagaactcttgtttttcgagcgctttcgggaatgtacccggcacaaccggaccttcctgtgcttctaattctttaatggcggcgagccattggttctggtgcatcgtgtcacgcgccagcaggaagctgagcatatctttgacgcctttgtcatccgtcatttcaaacaggcgtgcgacctgcagacggccctgagattccgcattcaggttggcgcggaagtctgccagcaggtttccgcttgctacgatataaccgccgctccaaggtacgcctgtactgctttccggcatggcgccaagtcctgatacaatcgcatggtgagggttcatgccgcctaggatggagccgatgaccggatcttcagcagctttttcctgctgatcaagaggggcatcctcaagaagtctggcaatcatcgttgcgatcatttcaacatgcccgagctcctcagttgccgtatccatcagcaagtccttgtatttttcatttcctcttgtgttccagccttgaaataagtactgcatggcaactgaaatttctccgaattgcccgcctaaaatttcttgcatttttttagcgaataatggatctggacgatctggtttagcaggatgctgcagcatttttgtgtgcttaaacatgtacccatctcctttttcgtttatctctttttatatttccgatcgatagaaagataaacgaaaaacagcgtatcgagatgggaactatgaatcttttcgcagctccaacagttcccggatcagctcccggccaaagatgggctcatactgccggtaaacagggtcaagacgcttcatccattcttgtttctctttatctgacagctcataaatatgtatagcagaattctttttgatttcttccagctgctccttgttcatttgttcggcatacgtttcattccactccgttgtctccttcatcgcttcagtcaaaatgcgtcttgtttctggtgtttgcgccttccagaagtgttcatcagtcatgacagcgtagccgagataaccgtggctgcttattgtcaaatagtcctgaacattataaaattttttagaatagatgtttgaaattgtattttcttcgccatcgactacattgttttctaacagctgaaaggtagaattgaaggattcctgatgaggtgttgcgccaagcagcttgaactgatcctcaatcacatcgctttgcataatgcgcagatcctgcccttttaagtcatccggtgttttgaccggcccttgatttgttgtgatttgcttaaagccgttcgtccaataggccaatcctttcaattggtttttctttagagaatcaaacagctgtgtgccgatgcttccgttcagcccttttttgacggcgttgtaatctgtaaatgcatacggcagatccagcactccccattcaggcgagagcatgccgagcttcgatgtggagggggcgataaattgaacatcgccgttttgcaatgcttcaatttcttcaatgtccgagtacaggcttccattcggaaatacttctatttttatttttccgcctgatttttcgttcaccagatcagcgaatttattggcggccagcccttttggcgtattttcagcaaccacgtggctgaatttaaacacgatttgatcctgcaggccttcctggtcgtcatcataaacaatctttttattgccggtatgatcatggaatccgataaataaagcggttgcaattccagcgatcatcagtgcgagacatgcaagcaaactcttcatgaaaagccctcccctatgttaaggataatgggggctatgacattcgtaaagacctgaaaggagaagctgatgaacaaaaagaagctctcaatccgttggaaaatcacgatcttatcctatatactcgtcattttctcctttttgatcggcggcattgtgctcatcggcaacattcagcatacagaggagcgggagctgaaaaagcggctgatgaatacggcccggacggtgtcagagatgacagaagtgaaagaagccttggcgcgaaaaaaacaaacagaagcggttcgccatgcggttgaagaaatcaggatgattaatgaagcagactatattgtcgtcatggatatgaatcacatccgatatacgcatcctgtcagcacaagcattggcaagaaatcagaaggtgcagacgaggaggcagcttttgcggagcacatttatttctctgaagcaaagggcgagatcggcacggcggttcgcgctttttatccggtaaaggatcaagacctgaaccaaataggcgtggtgcttgtcggaaaaacgctgccggggatcgctgacatcctgcttcatttaaagcgtgatatcgccttcatcgttgtgctgacactcggctttggccttgctggttcctttttgctggcccgccatatcaaaaaacaaatgtttcagcttgaaccccatgagattgtccgaatgtatgaagaacggacagcgacgtttcactcgatgaatgaaggggtgatcgctattgacaatcgtctcgtcattacgatcttcaatgaaaaagcgaaacagatctttgaagtgcagggggatctaatcggcaaggtgatttgggaggttctcaaggattcgcgcctgcccgaaatcgtggagcggaacaaagcggtttataatgaagaaattcgtgtcagcggtaaggtgatcatgagcagcagaattccgatcgtcatgaagaaaaaagtgatcggcgccgttgcgatttttcaggacagaacggaagcggccaagatggcagaggaattgactggtgtcagaaactttgtggaggcgctccgtgtccaaaaccatgagcatatgaataagctgcacacgatcgccggtctcatccagctggggaaatctgaaaaagccttgcagcttgcattccaggcgtcaactgagcaggaaaatgtgactgaatttctgcaccgctcgattcaaaatgacgctgcggcaggccttctattaagtaaaatcagaaggggaagagagctcggcattgctgttcatatagatgaaaacagcagtcttcagcaatttcccgagcatgttgatcagcatgatattgtcgtgcttttggggaatctgattgaaaatgccttcggctcatttgaaaccgttcaatctgaagacaaacgaattgacattagtatcgaacaaacagatgatatccttgctattttaatagaagataacggctgcggaattgaaccgacacatatgcctcgcctttatgacaaaggttttacggtcaataaaactggcggcacaggctatggcctgtatctagtgaaacaaatcatagacaaaggatcgggcacgatagaagttgattcacatgcggggcaggggacatctttttctatcgtttttccaatgaagggggaggaagcacagcatggctcgtaaagaatggaaggttctgctcattgaagacgatccgatggttcaagaggtcaataaggatttcattacaactgttaaaggcgttactgtctgtgcaacggcaggaaacggagaggaaggcatgaagctgattaaagaagaacagccagatctcgtcattctcgatgtgtacatgccgaaaaaagacggcatcaagaccttgcaggagatcagaaagcaaaagcttgaagtggatgtcattgtcgtctccgctgcaaaagacaaggaaacgatctcactcatgctgcaaaacggggcggttgactatatcttaaagccgtttaagcttgagcgaatgagacaggcactcgaaaagtacaagcaatataaacaaaaaatcgaagcgaatgatacgctgtcccaggaacagctcgatgcgatcctgaatattccgcagcaggccgtacaggatctgccgaaagggttgaatcacttcacgatgaatgaagtcactgcttttttgaaacagcaaaccgcatccctttctgctgaagaggttgccaaggcgctcggcatcgccagagtgacagccagacgatatcttgattacttagaaaaaaccgggatcatcaaattggacgttcaatacggcggagtcggccggccggtcaaccgctacgtgttaaaaggataaacctgagaccaaaaagaccaaaatgtccgttatgatcataaacttccccagactgtatgaaaacgctatcattctagtaagaaagacacaaaaggcgaataggacagggggatgaaggatatgaaactgtttaaaaatttaacagttcaggtcataaccgcggtcatcatcggggtcattgtcgggctggtctggccggatgtcggcaaagaaatgaaaccgcttggtgatacatttatcaacgctgttaaaatggtgatcgcaccaatcattttcttcacaatcgttctcgggattgcaaaaatgggcgatatgaagaaggttggaaaagtagggggaaaagcgtttatctatttcgaggttgtcaccaccctcgcactcattatcggtttatttgtcgtcaatattatgaagccgggtgcgggtcttgattacagcaagcttgaaaaaggagatgtatcacaatacacgcaaaatggcggtcagggaatcgactggattgaatttattacacacattgttccgtccaacatggttgatgccttcgcaaaaggggacattttgcaggtcttattcttttctattcttttcggagtgggtcttgcggcattaggcgaaaaaggaaaaagcgtcattgatttcttcgacaaggtttctcacgtttttttcaaaattatcggctacattatgcgtgccgcgccaatcggggcattcggggcgatggcgtatacaatcggacacttcgggctcgattccatcaaaccgctggcaagcttaatgatgtctgtttatattacgatgttcctgttcgtatttgttgctttaaatatcatctgcaagctttacggattcagcctgtggaattaccttcgcttcattaaggatgagcttttgatcgtgcttggcacaagctcttccgaatcggtgcttccgcgtatgatggataaaatggagcgctacggctgttccaaatccgttgtcgggcttgttattccgacgggctattcgtttaacctcgacggcacatccatctatttatcaatggcgactgtctttttggcacaggtgtttggagtagacctcagcatcggccagcaaattacgattatcctcgttctgatgctgacatcgaagggagcggcaggtgtgacgggaagcggatttatcgtccttgcctcaacgctgtcagcgctgcaggtcattccgctggaggggcttgcactcctgctcggggtcgaccgtttcatgagtgaaggaagagccattgtgaacctgatcggaaacggaatcgccacgatcattgttgccaaaagcgaaaatgaatttgatgaagcaaaaagcatagaggctgttgaaggcatgaaaaaaatgaaaacagcagtctgaaaaaagaacggcccatccatgggccgtttttttaattgtttaagaattattaaggtaaggacagagacctcagcatttttttgttatataatttacaaatggatactatattgaatgaaggacgtttgtcctaacaggagtgtataaatggccgctttagttaaattttttcagcacccgggagtaaggcgtttctccatctttgtcgtgttaactggtgtgttatatctatttaagagcatgatcaacttaatattgcttaccttcattttcacatttctaatggatcgtttggagcttgtcgtgcggcagtttgtaagccagttcttccgcgtgagccagcgggttgtcattacgtttctttacatgttgctggctgtgctgcttacagtcgggggctttgtgttttatccggtcgtcgcggcgcagatccagcagctggtaaagcagattaaacatattgcgtatcatcctgacagcatccctttctttgatgagatcaccagtgtcttcggagatattaacatcagttcatatgtcaaagagggcttcaatgtagtgtatacgtatctggccgatatcagcacattcggcttgcaggtcgtgatggcgctcattcttagcatgtttttcttatttgagaaaaaacggctttctgaattcatggcgaaatttaaaacgagcaaacttagggtcttttatgaggagattgcttttttcggaagcaaatttgcaagaacgttcggcaaggtgctcgaggctcaatttatcattgcgctcgtcaactgtattctgacgtttatcgcgctttggattatgcattttccgcagctgtttgggctttcgattatggtgttcttccttggattgatccctgtagcaggcgtcgtcatttccctgattccgctcagcattatcgcctacagcactggcggtggaatgtatgtgctctacattgtccttgtcatattcgccattcatgcgatcgaaacctatttcttaaatccgaagctgatgtcggcgaaaacagagctgccaatctttttcaccttcacagtactcattttctctgaacacttcttcggcatttggggtttaattatcgggattccgatctttgtgtttctccttgatattctggatgtcaccaacaaggaagataggtctaaaggaccccgagagaatagcgataaaaagtagtttaaaatcgaataatgagtgtgcctcgatctgccggcctgcctgttcagggcatggaattaagactcggaatcggagcttggcattgccttgcacagtggtgaacacaacaggtgacaatgcttgtcatcagtacggaaactgaaaagaacaaacagtcggagcaaacgctcatcatcggtttaaccaaacatttggaagcaacaaatgctataatacaaacagtgcctaatgttgggcactgtttattttttgtcgaaaaaggaggaaggctttatggctgagccgattttacatattgaaggcctcgataaaaaaattgggtctaaacagattttaaaacagatcagcatggacgtcatggagggtgaaatcatcggccttctcggtccgaatggttccggaaaaacaacactcatccgtatcatcgtcgggctgttgaaacaaaacagcggaagcgtgacaatcagcggattccagcatgatacagagtttgaaaaagcgatggaagcggttggagcgattgttgagaaccctgagttctatccgtacctgacaggctgggaaaacctcaagcactttgcgaatatgcacaaaaaaatagcggatgaacggcttgatgaagtggtggaacgtgtcgggctgacgtcagcgattcatgataaggtgaaaacctattcccttgggatgcgccagcgtctgggaatcgcccaggcaattcttcaccggccgaagcttctcattctagatgaaccgacaaacggcctcgatcctgcggggatgaaggattttcgggatcatattaaggaactcgcagaaatggaaggaacagctgtcctgttcgccactcatttattgcgcgaggttgaagacttgtgcgaccgtgtcatcatcattcaaaaaggtgagatcaaagcggaagtcagcttacaaggaaccgatcaaaccacagaaaaagcgattatagaagtgcagccgcaagaaaaagcgctcaattggctgacaggcaatcaatatcaagctgagagccaagacgggacgattgtagttgaggtggcaaaagaaaacataccggagctgaaccgatcacttgtcggacaagatctgaatgtattttccattacgccttacacgcagtcactggaagacgaatttataaaagcgacaacagctcatcaagaggagggagaagagcttgtctaaattaatttggaatgaacatatgaaactttttaatcggaaggtcactttggtttctcttatcctgatggctgtctttcaattcttcatggcattgatcattaaacggattgtcatcagtgccggaacagatgaaaacttcatcggctatttatcgtatacaccgagcctgaacattttgctgcaggctttaacgatcgtaattgcagcaacaattgtttcgatggaatttgataaaaagacgatcaaatttttgctcattcgtccggttaaacgccaaaaggtcttttggtcaaaattaatcacagtcgtgatggtcagcttctatttgtatttggcatactacattctggcattattattcggtctcttgttttttggcacatcggtgactgcggaatcaaagacattgctggtcaacaccttggcgctgatcgggtcaaactggcttgaagctgtaatgatgggattattcgggctgctttgttcttcgctgttccgcaatagcgcggtagcagttgttgtttcttttgtcgttttatacggagcgagtacacttgttcagctcatgaagttgtttgaaaacaagtggggcagctttttgctttttgcgaacactgactttacgcaatacagaagcggagagacagcgttgttttcaggcatgacgccattgttttcaattggaattctcatcatacatgccatattcttcatcgttgttggctggtggtgcttctgtaaacgggatgttcgggtctaaaggcaaggaatgacatttttgtgaaaaagctcacgtaaatcaatatcatttgatattttggtttatactaaaggtactgacggaggtgtctcgattgaggaactttattaccgctttaccgatcgtattgctgcttggattctcatttgtgtcattcatgtttcagtttgaacatcttgtttatttcaggctcgcgcttgggttgttttctctcgtgggactgtacatgatatataaaatgaagacgggcatccgctattttatcatctatctgtatgccagctggattgtgttggccgcagtgaccgcttttgaagagccgattttctcaagctttttctttggcggcctggtgatgacgatgggttacctgacatatatgctgatttatctcggcatgaaacaagaccgggatgcaaatcctgtgtaatcgcgctgttcccttggggaacggcgtgtttttctatactgggcaaaaggttaacagttgcggaaaaatggcaggaaatctataatacatattaaatttatcggaattaaaactggggggctgccggatgtcattatttatacaaaacgatcaacagcggcaatggatggagaaaatcggacggattgcggatgaatttcagcaaacagctgctgaagatgacgaacagggacgttttcctgcagagaaaatacaaaaactgcgtgatgctgggtatacagcattaacattgccggcatctcatggcggagggggcatttctgtttacgatatgctcttgtttcaagaacggcttgcacggggagatgctccgacggctcttagcatcggctggcatttgagcgtgatcggggagcttggagaaggcaacagctgggatgaagacgtatttgcatttgttgccaaggaagtccaaaacggagccgtcattaacagggcggcgactgaagcgaaaaccggaagcccgacaagaggagggcgtcccggtacacacgccgtcaaaaaggatggcaaatgggcagtgaacgggagaaaaacctttacgacgatgtcacaagctctggattattttttagtaaccgcatggattgaggacaaacaaacaacaggcgtgtttctcattcataaagatgatcccggcttgtcgattgaagaaacgtgggatatgatggcgatgcgggcgactgggagccatgaccttgtactgaacgaagtaatgcttgatgagaataagctggtggaactgcttcaagggcctcgtggagctaagccgaatggctggctgcttcacattcctgcgatttatcttggtgtggctcaagctgctcgtgactatgcagtgcaatttgcatctgagtattctccaaacagcttgaatggaccgatcaagaatgtcccggccgtacagcaaagaacaggcgaaatggagcttgaactgctcaatgccagacactttcttttccatatcgctcaattgtatgacgatccggtgcggcgtccacacttgaccagcgagctcggtgcggcgaaacatatcgtcacaaacgctgcgctgtctgttgttgataaagcgatgagaattgtcggggccaaaagcctggaacgaaccaacccgcttcagcgctattaccgtgatgtgcgcgccggtcttcacaacccgccgatggatgacgccgtgatacacaagctggcagctgaagcgtttgagtcataaaaaaaagagccttaccggctctttttatgtattgttttgctcttgcagatttttttgatgcttgcggtcgatcctgtcataaataacgttcatcagctttggattgcccataatcgcctctttgttttcctggatcagctgttggtaagttttcactttacgcttcggcatgctccggcgccctcctgacatgtttgtattcactttctaactccgtcagcgacaattcatacagatgacgctttgactttttgtatataccattctgtattaacagatgaatgagctgtttttttctgatttctgcagactgaggtgtcattgtgtcaccaacctccaatcaaacgatattgataatcattatcaattaacttcagtatacaatgtccgcaatagcctgtaaagatgaaaagagtcctattcttggccaatttacaaacattcaacaaatcgacaaaaagtttcccgggcaataatttgctgtcgaaatattccgcttcattgaacgcaccctgctatttttcatgttttgaaccatactatgtaatagaatggaggctggtattcaatggagcggacagaaaatctgaaaaagggagaaaaaggggcgctcctcaatatttttgcatatgtcatccttgctgttgtaaagctagttatcgggattctatatcattctgaagcgctgagagcagacgggttaaataatggaacagatattgttgcgtcagtagcagtgctgataggattgcggatttctcaaagaccggctgacagcgatcatccatacggccattatcgggctgaaacaatttcgtctcttgttgcgtcttttattatgatggcagtcggcattgaagtgttaatcggcggaggaaaagcgattgcgggcggcacaacggaaacgccaaatcttatcgcggcatggacggcgttaggcagtgctgtgtttatgtatggcatctatttatataacaaaaggctggcagcgtccattaaaagctctgccctgatggcagcggcaaaggacagcaggtcagacgcttttgtaagtgccggcgcgtttatcggtgttttttcgtcccagctgaagctgccgtgggttgatccggtaacggcttttatcatcggcatcatcatttgcaaaactgcgtgggatatctttaaagacgcttcacattccttaacagacggcttccatttaaaagatcttgagccttacaaacagaccgtcggcaggatcgaaaatgtgcatcgcctaaaggatgtgaaagcgaggtatttaggcagtacagttcatatcgagatggtgattacggttgatccgaagcttacagtagaagaaggccatggagtggcggatgaagtagaagacaaaataaaacatgaacacgatgtcactcatgttcatgttcatgtagagcctgacgacataaaataaggctgtttaacgaattagcttatatgttcagataaaaattcagtcacttcttcaggcgttttggcattggcgctgtgaaggtgagctgttttttcaccgttcttgaaaataagcaggctgggaatgcccattacttggtatttttcagccaggtcaggaagctcgtccttattcagctcataccagtcgttttggttgtattcttccaaaatatcgccgatgaacatattcatgcgtgtgcagtctgggcaccaatcagcataaaactttacaatgatttctttatcagattgaatcagttcattaaattgttcgtttgttgtgatttttttcatatgtcacatctccttttcaatgccattttaatataaaataaaaaggaattacatacaaatgcattcaacatcagcatgcccaaaaataattagatcattttccggtgaaaatgataagatagtaaagatgaattgtagtggggggagtatccattgaaaacaagtctaggattagtgtacggaggaaagtcggcagaacataatgtttccctgcagacagctctggctgtaatcaaagcgctaaatactgagaagtttgatatacatccgatttatataacagaaaaaggcgaatgggttagaggcgcccgtttaactgaacctgtttcaaacgtgaaaatgcttcaatttgagcaaggaggcagtgctttttctccagctgccctgaaccaggagatgtttccgcaggaagcgtcacagcaaaatgaagccatcgacgtcgtattcccgctcctccacggaccgaacggagaagacggtacgatccagggaatgctcgagctgttgaacattccttatgtcggcaacggagtgcttgcttcctcagctggcatggataaagttgtcatgaaacatttatttgcgcaggttggccttgctcaggctaaatacgcagctttccttaagaaagactggactcgttctccgaaagaaagctgtgaggaggttgaacaggaattaggctacccttgcttcgtaaaaccggcgaacctcggctcaagtgtcggaatcagcaaatgccgaaaccgtgaagaactgcaaaaagcgtttgagcttgctttccaatatgaccgcaaagtcgtcgttgaagaaggaattaacggccgcgagatcgaaatcggcgttcttggaaatgatgatcctaaatgctctgttgtgggagaaatcgcaccgaagacagatttctacgattacaaagcgaaatatgaggatggagatactgatctgatgattccggcgattgtgactgatgaggaatacgcaacaatcagtgatatggcgatcaaagcgtttaaagcgatcgacggttcaggactcgtcagagcggactttttcctgacagctgacggcgaagttctgatcaatgaagtcaacacaatgcctggctttacacctttcagcatgttcccgttgctctggaaagaagccggagtggaatatgctgacctgattgaacagcttgtggagcttgcaaaagaacgccacgctgaaaaacaattgattaagcatacattctaatgaagaaggacactgccggtaaaagggcagtgttttttcccgtatatacaaaagaaagagagggaccttacttgattaagcgaacagtaaaaaacattgccgaaatggttaaaggcacactagcaaatccgcaatatgaacaaacagtcattcatggagtggcaaccgatacaagaaaactggaacaacatcagctctttattccgctgaaaggggaacgttttgacggccactcttttgtggagcaggcctttgaagctggtgtagcggctgttctttgggatcggtcagtaccaaatccgcccgagaatcacgccgtcattttagtggacgatacccttactgcacttcagcagcttgcaaaagcttatttgcaggagcttggcacgcgtgtcatcggagtaaccggaagcaatggcaaaacgacaacaaaagatatgattcacgccgtattggggacccagtaccgtgtccacaaaactggaggaaacttcaataatcatatcggtttgccgctgacggttttagcgatgcctgaaaatacggagatcgccgtattggagatgggaatgagcgccaaaggagaaattgacctcttgagccgactggcaaacccggatgcggcagtgattacgaatatcggcgaatcgcatatgcaagacctcggctctagagagggcatcgcggaggcgaagcttgaaatcataaacgggcttaaagaagacggagtgctgatttatatcggggacgaaccgcttcttcaaaatgcatacagctgccagacgaaaacgtacggtacgggaacgcataatgattatcagcttcaggatgtcagccagagtgaggaaggaacccattttacaatcaaagggatagaaaacacgttttttattccaatactcggcaagcacaatgtgatgaacgccatggctgcaattgctgcaggggcttattttggcatcgcgcctgaggatgcggcaaaaggactgagcggcctaaaggtaaccgggatgaggcttgaactcatcaaaacagacagcggcctttcgataatcaatgacgcttataatgcgagcccgacttccatgaaagctgcaattcaattgacagaaagccttgaaggctacggcaaaaaaatgctcgtgctcggtgatatgcttgaactcggcgatcttgaagaaacgttccataaagagtgcggcgctgtgatcagccctgataaaattgaccgcgtctttacgtacggaaaactgggagcttttatcgcggaaggcgccctgaaacactttgagaaagaccgcgtcagccattacactgagaaaaaagatctccttcaagctgtgaaggaaaacgcatcaaaaggcgatttgattttattcaaagcgtccagaggtatgaagcttgaagaaatcgttaaagatttaatagagagcccgctttcataagaaaatattttgcgaaaaaacgcatattgcatcataaaataacctgatatgcaaacactaatgtatgccggccgaaaattatgtatatctggccggctgcggctatgatacaatatatataggttatttcgcgatacgaacatattcgtccggacttttcatcgtgacccgaagttctccgctggattcttgggagcggatggagcagcagccggcatattcgagatgccgatctgcttctcatcttattgaaaaacaaatagtgtaatggtaagataaaacttaaagtaattcgggctttgtatacggatggatcctgtccttcttgtctaaagggcagttttataagtggtaaatcacgacattactgaaacagcaattagaaggagtttgaataatttgactataacgtttcaagattttaatttaagttctgatctcatgaaagcaattaatcgtatgggatttgaagaagcaacaccgattcaggcacaaacgataccgctcggactttcaaataaagacgtcattggacaagcgcaaacaggtacaggtaaaacagctgcgtttggtataccccttgttgaaaaaattaaccccgagtctcctaatattcaagcaatcgtaatcgcgccaacccgtgaattagccattcaagtatctgaagaattgtataaaatcggacaagataaacgtgcgaaggttcttcctatttacggcggacaggatattggacggcaaatccgggcgttaaagaagaatccgaatattattgtcggaacacctggacgtcttcttgaccacatcaaccgccgcaccattcgtttaaacaatgtaaataccgttgtaatggatgaagcggatgaaatgctgaacatgggattcattgacgatattgaatctatcctttcaaacgtgccaagcgagcatcagacacttctgttctctgccacaatgcctgcgccgatcaaacgcattgcagagcgcttcatgactgagccggaacacgtaaaagtaaaagcgaaagaaatgacggtttctaacattcagcagttctatttggaagtgcaagaacgtaaaaaattcgatacactgactcgccttcttgatattcagtctcctgagcttgcgatcgtattcggacgtacaaaacgccgtgtcgatgagctggctgaagctctgaaccttcgcggatatgcagctgaaggtattcacggtgacttaacgcaggcgaaacgtatggttgcgcttcgtaaatttaaagaaggcgcaatcgaagttctagtcgcaactgatgttgccgctcgcggacttgatatctcaggtgttacacacgtatacaacttcgacgtgcctcaagatcctgaaagctacgttcaccgtatcggaagaacgggccgtgcaggaaaaacaggtatggcgatgacgttcattacaccgcgtgagaaaagcatgcttcgcgcaattgaacaaacaacaaaacgcaaaatggaccgcatgaaggagcctacacttgatgaagcgttagaaggtcagcaacaggttactgttgaacgtcttcgcacaacaatcagtgaaaacaacctgaacttctacatgacagcggcagctgagctgcttgaagatcatgatgcagtaacagtggttgcggcggctatcaaaatggctacaaaagagccagacgacacaccggttcgcttaacagacgaagcgccgatggtcagcaaacgctacaagaaccagcgctcttctaaacgcagagacggtcaaggcggcggctaccgcggcggaaaagggaaaagcaacaaccgttcttcctatgacaaaaagcgttcaaacgatcgccgttcttcaggtgacagacgccagaaaaaatcttactaatttgatcgattcagagcccaaaacatgatgttttgggcttttttatgttcgtgatttgttattcagcaaactttcagctgacggaagccatttttctctgtatgcttaagaatgaaacctttctgtaaaagagacgtataaataacgacgaaaaaaagggaggtaggtatttttgagagagcagccaaaaaaccaaatcagtccagacggattaaaggtttggcgacttcaagagatcatcatatccgctgtttgcttgcttattgtcattgcagttgcagtgttaagctattattttcattggccgtactggatcagcggcgtgctcggcgctgtttggctgctgggatcgattgtgacggtctttatcattccgaaggtccgtcataaggtgtggcgatatgaagtccatgaacatgaaatagatattcagtcaggtatttttgtggtgacacgtgtgattgttccgatggtcagagttcagcacgtcgatacgtcacaagggccattattaaaaaaatacaacctggcaacggtgaaaatttccacagccgcgaccgttcattcgatccccgctttagagatggaggaagcggatcggctaagagactccatttcccgtctggcgagggtgactgacgatgatgtctgaaccgaaacgcctgcacccggtggcagtcattttgaatttatgccataccattattcaaacgataaaaaatatcattctgccattcttttttgtgtatattgtcaattcaaaccatactgtccgtttttacggagccattgcgctcggtgtgctgttcatctggcttgtagcggcaagcattatcaaatggagaaggtttacctatcgaattgaagatgatgaatttagaattgaagaaggcttatttgttacgaaaaaacgatacatatcgattgatcggattcaaacaatgaatacgagcgcgggccttgtccagcaaatctttaagcttgtgaagctgcaaattgaaacagcaggcggaggcaaggaggcagaagccgttctttctgctatttctgttgaagaagcggaacgcatcaaagaagctgtctttaagaaaaaagcgcaaagacgagaaaatgaacttgatgaagaacggcttgaagctgaagaggagttggatccgtccgttgaggtgcaagagcactatcgcatgaacgcgaaagaattgctcatggccgcttctacctccggcggaatcggagtcattatctccgctgtatttgcacttatttcccagcttgatgaagtgctgccgatggattggttattcgataaattttccttccttcagcacgccagcatcggtatttatgcggtactcatttttatcggtttatttatcgcctggattttcagcatcgcgggcatgatgtttagatacgcgaactttcaaatcataaaaaaagagcaggaactggtgatttcaaggggaattattgaaaaacatcaagtcacgattccgctgcgaaaaatacaagccattaaaatcaaagaaaatatcattcgccagcttttcggctttgtaacggtgtccatcgtcagcgcaggaggcggcgaccgggaaaaagaagaaggcgctttgaccattctctttccaatgattcataaaaaaaagcttccgcacatgctccgaacatttacgccggaatacacgctggaagaaaactgccgccgcctgccgcggcgcgcgttgaaacgctatttgttccgttctgtcattttttcactctttttgatcatcccgttatgtatcttctttcagccatggggctatctgtcagtgatcctgctgccgatagaattgctcttcggctatctcgcgtataaagaggctgcatggacgatcaacggggaccgtcttcagctgacgtctagatttataggcagaacaaccgccattgtactgaaaaaacgaatgcaggtctgcaagttcagccaatcctatttccaaaagaaaggccgcttgtataccatttctacttcggtgaaatcatcgagccatatggaagagttaacggtgagggacgtaggtgaagaggatgcagccttcattttaaagtggtactcatatgaaaaagcggacggttaataccgccgctccagcgtgtcggcaaaccctcgcattcgttgtcaggactgcgcttcggtgctcaatgcgaagtggatcaacggctaaattctcaggcgtcctgcctaaacgccgtcgtcatcacatcctgtgaaagtccgctcctatgctcgtccttcctagacttcatgggttttcaatcacgctgaaaagatgacaaaatcctaaaatgaaaaccattttaggattttgtcaacaatctgaagcggcggttaataccgccgctcttttttttgcacgcataaaaacgaaagaagaaacccgccgcatagtccaaacaaatgggccatcatgttaatattggagttgataaacgacatgagaacggcaaatgcgagcagtgtgatgatcattttggaatgctcctgcccaattaactcattgcgaaaaagaaccataaacaggtatacgccaaatagcccgaaaatggcgcctgaagccccgacatgcacgtaatcaagcggctctgtaacataagtgccgatattgccgatgatgccggagccggcgtatacaagaaggaaacgcgcttttcccagcatgcgttccaaagccggggcaaataaaaagatggacatggaattaaacagcagatgtgtgaaaccggcgtgcagcaaaatcggtgtgataagccgccaccattcaccgtttgcgacacctagattatagcctgtgacggtatccctccataacacgactgaatgggcaggaagtgaaaaaaacagccagagaacagcttgcaaagccaatataaaggtgacaacggggtaaagcctgataaatgtttgaaaattttcagtccgtataaacattccgagccccttttcttcattttggtatatctatagtaacacgtttatgagacaaaccatttaaatagtacgtacgcaaaggaggttatcatacatgatttacggcattgggctggacattaccgagcttaaacggatcgcctctatggctgggcgccagaaaaggtttgccgagcggattttgacgcgaagcgagcttgaccaatactatgagctttcagagaaaagaaaaaacgaatttctcgcgggcagattcgcggcaaaagaagcgttctcgaaagcatttggcaccggcattgggaggcagctcagctttcaggacattgaaattaggaaagaccaaaatggcaagccctatatcatttgtacgaaactgagccaggccgccgttcacgtatcgatcactcatacaaaagaatacgctgccgcgcaggttgtgattgaaaggttgtcaagctagtctgcatattagggaaaccccactcatatatttgatagtgcattaagggagacaagttgtttgaggcttttatggtacgcatctgttctgcctaaacgtgtaccgagcgtaccgttaaagtcaaacaagcgatttcttccttttacatcaattgagaaaaaggggttgaaaaaggtgagaaaaagctttgttttgcttttaacgggactgcttgctgttcttattctttctgcctgcgggcaaaaaacacagcaagatattgtggccgggttagatgaaaaggcgaaagaatacacctcgtacaaagcaaaagcgaaaatgaccatcgagacagggagtgagcctcaagtatacaatgtggaaatctggcacaaaaagccgtctctgtacagggtttatttagaaaatccgaaaaaggaccaaaaccaagtcattttacgaaatgaaaacggagtattcgttctcacgccgtctttaaataagagcttcagatttcaaagcgattggccgaacaacagcagccaggtttatctgtttgaatcgctcgtaaaggatgttcaaaacgattcggatgcagttttcacagcgaaagaaaagaaatacgtatttgaaacaaaaacaaactatcagcataacaaaatgctgcccacgcaagaaatcacatttaacaaaaaagatatgagcccgtcatctgtcaaagtgatggatactgaccggaaagtgatggtcaaagtagaattcagcagctttgaatttaataaacaatttgataaagaatcatttgatgaaaagaaaaatatgaccctttctcaaatggatgtcgccacaagcgcaaagccttccgatacatttgcggtcaaaacgccgctggaactgccgcttggcgtcaagctgcttgaagaaaaagatatatctactgaagacgggaagcgcatcatcatgacgtacggaggagaaaaatcatttacgttaattcaggaaaaagcccagattgccaaggcttcctcctccgttacgctgaacggcgaaccggtaaatctcggctacaccatcggcgccctgtcggatgcatcattatcatggacatatgacggcgtagattaccttctctcttctaaagatctttctaaagaggaaatggtgacagtagcgaaaagcatgcagggacaatcatcgaaataaccgccaaaggccaaacatgatttggcctttttttcgttagacatcgtttccctttagcctttaattttagtatgatatgtaaatgatattgaataaaagctaggaagtgtcgtaatgagcacaaaacctttttacagagatacgtgggcggaaattgacttgtccgcgataaaggaaaatgtcagcaatatgaaaaaacatatcggtgaacatgtccacttgatggcagttgtgaaagcaaacgcctacgggcatggtgatgcagaaacagcaaaggctgctcttgacgcaggtgcttcatgcttggccgtggccattttggatgaagcgatttcactgcgcaaaaagggattgaaggcgcctatattggtgcttggcgcggttcccccggagtatgtggcaatcgctgctgagtatgacgtgaccttaacaggttattctgttgaatggcttcaggaggcagcccgccacacgaaaaaaggttctcttcattttcatctgaaggtcgatacggggatgaacagacttggtgtaaaaacagaggaagaagttcagaacgtgatggcaattcttgaccgcaaccctcgtttaaagtgcaaaggggtatttacccattttgcgacagcggatgaaaaagaaagaggctatttcttaatgcagtttgagcgctttaaagagctgattgctccgctgccgttaaagaatctaatggtccactgcgcgaacagcgccgctggactccggctgaaaaaaggcttttttaatgcagtcagattcggcatcggcatgtatggccttcgcccgtctgctgacatgtcggacgagataccgtttcagctgcgtccggcatttaccctgcattcgacactgtcacatgtcaaactgatcagaaaaggcgagagcgtcagctacggagccgagtacacagcggaaaaagacacatggatcgggacggtgcctgtaggctatgcggacggctggctccgaaaattgaaagggaccgacatccttgtgaagggaaaacgcctgaaaattgccggccgaatttgcatggaccaatttatggtggagctggatcaggaatatccgccgggcacaaaagtcacattaataggccggcagggggatgaatatatttccatggatgagattgcaggaaggctcgaaaccattaactatgaggtggcctgtacaataagttcccgtgttccccgtatgtttttggaaaatgggagtataatggaagtaagaaatcctttattgcaggtaaatataagcaattaacttacctaaatggagaattcataaaacagctttgcttgaagagtgaataatggtatcattatcactggatggataaaagagtcgtatccgtaagtttggtggaggtgtatgttttttgtctgaatccagcgcaagaaccgaaatgaaaatcagcttgcccgaaaacctagtagctgaattggatggtgtagcgatgcgggagaaacgaagcagaaacgaactgatatcacaagcagtgagagcgtatgtcagcgaacgaacaactcgtcacaaccgtgatttgatgagacgcggctatatggaaatggcgaaaatcaacctgaatatttcttctgaggctcactttgcggagtgcgaggctgaaacgacagttgagcgcttagtcagcggaggataatcatttgattgtgaaacgcggcgatgtttattttgctgatttatctcctgttgttggctcagagcaaggcggggtgcgcccggttttagtgatccaaaatgacatcggaaatcgcttcagcccaactgctattgttgcagccataacagcacaaatacagaaagcgaaattaccaacccacgtcgaaatcgatgcaaaacgctacggttttgaaagagattccgttattttgctggagcaaattcggacgattgacaagcaaaggttaacggataagattactcatctggatgatgaaatgatggataaggttgatgaagccttacaaatcagtttggcactcattgatttttagacatatttgcaggttgctcaaatagagcaactttttttgttttcaaaaaacataaacgatataatagtgaaataacgaaaaaatatgttgttttttattgggaggtaagcgaatttgatgtcgaaccagactgtataccagttcattgccgaaaatcaaaatgaactgctccaactgtggactgacacactaaaagaattaagcgagcaagaatcctatcagctgactgaccaagtgtatgaaaatatatctaaagaatatatcgacattctgctgctgtctgttaaggacgaaaatgctgctgaaagccaaatcagcgaactggcgcttcgagcggtccaaatcggactgtctatgaagtttttggctactgcacttgccgaattctggaagcgtctctacacgaaaatgaatgataagagattgccagatcaagagagcacggaattaatctggcagattgatcgctttttcagcccgattaacacagaaatttttaatcaatactcaatctcatgggaaaaaacagtatccctgcaaaaaatcgcgctgcaagagctgtctgcgccgcttatcccggtgtttgaaaatatcactgtgatgcctcttgtcggaacaattgataccgaacgcgcgaaacgaattatggaaaaccttcttaatggcgtcgtcaaacaccgttcccaagtcgtgctgattgacattacaggtgtccctgtcgtcgatacgatggttgcccatcatattattcaggcatcagaagctgtaaggcttgtcggagcaaaatgcctgctggccggaatccgtccggaaattgctcaaacaatcgtcaacctggggattgatttatcccaagttataactaagaataccctgcaaaaaggaattcaaacagcattggaaatgacggatcgaaaaatcgtttcattgggggaataacattttgagacatccgaaaatcccgatcttgaaactgtataattgcttattagtgtccattcagtgggaacttgatgaccagacagcattaacttttcaagaagacttattaaataaaatatacgaaacaggtgctaacggagtcgtcattgacctgacatctgtggatatgattgattcatttatcgcgaaagtgctgggggacgtcattacaatgtctaagttaatgggggctaaagtcgtcttgaccggcattcagcccgctgtggcagtgacgctgattgaacttggaatcgcgcttgaggaaatcgaaactgcgctcgacttagagcaggggcttgagacattgaagcgggaattgggggaatagcgaatgaacgaccaatcctgtgtaagaatcatgacagaatgggatattgtggccgccagacagctgggacgaaacgttgcgaaagaactgggtttcggcacggtagaccaggctagaattacaacggctatttcagaattagccaggaatatttatttatatgccggcaaagggcagattggaattgaacaggtcgcagacagaggaaaaaaaggcctgaaaatcatagcggaagaccaagggccgggaattcctgatatccgaaaagtcatggaagacgggttttcaacgtctggaggacttggtgcgggacttcccggggtcaaaaggctgatggatgaattcagcttaaattccgtagcgggggaaggaacagagatacaagccatcaaatggcttcggtaggaggtaagaacgtggattttagggaggttattgagcagcggtatcatcagctgcttagtcgatatatagccgaattaacagaaacatctttatatcaagcccaaaaattcagccgaaaaacaatcgagcaccaaattcctccggaagaaatcatcagcattcacagaaaagtgctgaaggagctgtatccaagtctcccggaagatgtgtttcattcgctggattttttaatagaagtcatgattggctatggaatggcttatcaggagcatcaaacccttagagggatacagcaggaaatcaaatcagaaattgaaatcgcggcaaatgtccagcagacgcttctcggaactaaagttcctcaggaggaagcgctggatatcggcgccatcagtgttcccgctaaacagatgagcggtgattactaccactttgtcaaagacaaggaatccatcaatatcgcaatcgcggacgtgatcggaaaaggcattccagcggctttatgcatgtccatgattaaatacgcaatggactctttgccggaaacgggcatacacccttctcaagtgctgaaaaatttgaatcgtgttgttgaacaaaacgttgatgccagtatgtttattacgatgttttatgcgaattacaatatggacaagcatcaatttacatatgcttcagcgggacatgaaccgggattctattattctcaaaaagacaacacgttttacgatttagaggccaaaggactcgttctcggcatctcgcaggactatgactacaaacaattcgatcagcatctggaaaagggcgatatgattgttttattttctgacggcgtcacagaatgcagaacggaaaacggtttcttggagcgtcctgatctgcagaagctcattgaggaacatatgtgttcctctgcgcaggaaatggtcaaaaacatttatgacagcctcctcaaattgcaggattttcagcttcacgatgattttacgttaattgttttgcggagaaaggtttaacgtctgtcagacgagggtataaagcaactagtgatttgaaggaaaatttgaggtgatacgaatgaatataaatgttgatgtgaagcaaaacgagaatgatatacaagtaaacattgcaggagaaattgatgtatactcagccccggtgcttagagagaagctcgttcctctggcagaacaaggagctgacttaagaatttgcctgaaagatgtcagctacatggacagtaccggattgggcgtttttgtagggacctttaaaatggtgaaaaaacaaggtggttcgctgaaacttgaaaatctttctgaacggctgatccgactgtttgacattacaggcttgaaggacatcattgatatttctgcaaagtcagaaggtggagtgcaatgaagaataatgctgattacatcgaaatgaaagtgccggcccaacctgaatatgtgggaattataagactgacgctgtcaggggtcgcaagcagaatgggctatacgtacgatgaaattgaagacttgaaaatcgcagtcagtgaggcgtgcacaaatgcggttcagcacgcttacaaagaagataaaaatggggaagtgtcaatacgattcggtgtgtttgaagaccgtttagaggttattgtggcggatgaaggagacagctttgactttgatcaaaagcagcaggatctagggccgtacacaccttcgcacacagttgatcaattatcagaaggagggctcggtctatatttaatggaaacgctcatggatgaagtcagagtgcaaaaccactccggcgtcaccgtagcgatgacaaagtatttaaatggggagcgagttgatcatgacacaaccatcaaaaactacgaaactaactaaagatgaagtcgatcggctcataagcgattaccaaacaaagcaagatgaacaagcgcaggaaacgcttgtgcgggtgtatacaaatctggttgacatgcttgcgaaaaaatactcaaaaggcaaaagcttccacgaggatctccgccaggtcggcatgatcgggctgctaggcgcgattaagcgatacgatcctgttgtcggcaaatcgtttgaagcttttgcaatcccgacaatcatcggtgaaattaaacgtttcctcagagataaaacatggagcgttcatgtgccgagacgaattaaagaactcggtccaagaatcaaaatggcggttgatcagctgaccactgaaacacaaagatcgccgaaagtcgaagagattgccgaattcctcgatgtttctgaagaagaggttcttgaaacgatggaaatgggcaaaagctatcaagccttatccgttgaccacagcattgaagcggattcggacggaagcactgtcacgattcttgatatcgtcggatcacaggaggacggatatgagcgggtcaaccagcaattgatgctgcaaagcgtgcttcatgtcctttcagaccgtgagaaacaaatcatagaccttacgtatattcaaaacaaaagccaaaaagaaactggggacattctcggtatatctcaaatgcacgtctcgcgcttgcaacgcaaagctgtgaagaagctcagagaggccttgattgaagatccctcgatggagttaatgtaatgatccaggttgaagaaaacgagcatattcaaactctagtatatcaactgaataaagaagggaaatcgatttgcggtgacagtttttttatgaaagctgatgataaggagttaatttgcgcggttgctgacggactgggaagtggatcacttgctaacgaatcctctgcagccatcaaagacttagtggaaaactatgcgagtgaagacgtagaaagcattatcgaacgctgtaatcaggcgatgaaaaacaaaagaggcgctacagcatctatcctgaaaatcaattttgagcaaaggcagtttacgtactgctctgtcggaaatgtacggtttattctgcattccccgtctggtgaaagcttttatcctctgccgatttcgggctatttatcaggcaagccgcaaaaatacaaaacgcacaccgccacctatgaaaagggttcaaagttcattatacatacagatggactcaacgtacctgatatccgctcccatttgaaaaaaggccaatcggtagaagaaatatcgaattcgctgaaaatgtatacgacatcgagaaaagatgacctgacctatattctcggacagctgtcctaaaaaaccagaaaaagaagctggacatccggcttcttttttttgcggttgactattaataagtgcgcttattataattaataagtgaacttatcattctgggagcttatgggatgtggaattatgaatacacagcgatagctgatgtggatgtgggaaaacctggaactgttatcaggaaacagaaacaatggatcaatgggagacgggtattgcatcagattctttgaaaggacaatttcaaaatggaacggaaggaacattgcttctgcaaggaaaaacaattctcttatggcttgagcatgtggagaaacatcgggcgttttctgtcatggtcaacatgcccgcatagcaatgtaataatggagttttttcacgtgcttcaaaagcaaaaagaagatttgtgtatcacatatggaattgtattagaaggcgctgaagcaaaaaagtggggagaaatcattgggactgaactgtctaaagacatgccgacggctgtcagcaggcttgtccatctttacggaggagtgataaaatgaacacaaattactggatcggcgttgtgtcagagcaacatgtattaaaaggcgctgccggcggttttgcacagctgtgccatggaaaaaaagccccgctcgccaaaatgaaagagggagattggctgatttattattctccgagagacgcatatccagacggcaaactgctgcgaagctttactgcgatcggcaaagtaaaaagcggaaacatctatccgtatcaaatggctccgaattttattccataccgattagatatagactattatccatgccataaaatcggtttttacgacattaaatcaaagcttgaatttgttcaggaaaccaagcatcttggctttttatttcgcagaggacactttgaaataagcaaaaaagattttttgacaatagcacaagcgatgggagttaacataagtggaatggcactctaaatttagcggtccgaacacaagcccgggctttttattatggcaggccacgcaaagttggcagcggaaagtaggaaaagcattggctgagtttgacctgacccacgttcaatttgttctgctgacctcgtgcaagtatatgattgctcacggagaaaccgtcacgcaaaaaaaacttgcaagcttcagccagaccaatatcatgatggtttcggaggttgtgcggacgcttgagaaaaaaggatttatcgaaagaagcaaaaatccccaggataaaagagaggtcctcctgtctcttacagaaataggaggagaaaaagtaacagcggctttgccaattgttgagaagattgatcaagccttctttgcagctgcgatgaaaaaagagaattttctgagcggcttacaggaactattgaaacatgagtaaagatacgggcagcgccagctgtctttttttatgtgtttttttcggtttttgatacactagagaaagaacgacaaaattggaggctttggttacatggaaacgtcagcccttttaaaacagcaaattgcgaaagaaataggtttatcacaaaaacacgttgaaagtgtcatccgcctgcttgaggacggcaatacagtcccgtttattgcccggtatcgaaaagagcagacgggttcaatggatgaggttcagattcagacgatttctgaacgctggcaatacatacaaaacctgaatcagcgaaaagaagaagtcatcaggctgattgcagagcaggataaactgacagataatctaaaacgtaaaatcgagcaatcggtgaagcttcaggaagtggaagacctttaccgcccttataaacaaaaacgtaaaacaaaggcgacagtcgccaaaagcaaaggccttgagccgcttgccgactatatcctgacacttccccaagatgatcatctggcagcaactgcagaccaatacatcagcgaagaaaaagaagtgttcacacgagaagaagcgattgaaggcgccaagcacattattgcggaacaaatctcagacgagccgaccttcagaaagtggattcgccaggaaaccttcaaaagaggaaccattaagtctgcagccggaaagtcggcagacaccgatgagaaaaatgtgtatgaaatgtattacgagtatgaagagccaattgcaaaagttgttccgcatagggtgctggcaatgaaccgcggcgaaaaagaagacattttaaaggtagcgatcgaaccgcctgcggatcacattaaggcgtatttagaaaaacaaatcatcaaaaatcgctcaacatccgtaagagagattttgcaggagacaattgaagacagctataaaaggctgatccagccggcaatcgagcgtgaaatcaggaaagagctctcagaaaaagctgatgaacaggcgattcatattttctcagagaacttgagaaagcttcttttgcagccgccgatgaaaggcaaaaccgttctcggtgttgacccagcctttcgaactggctgtaagctcgctgtgtcagatgagaccggaaaagtcttgaaaattgatgtgatctatccgcatgcgccagtcaacaaaacaaaagaagcccatgaaaaagtgaaaaagattcttgagcagtatcaagtcgagatggtggcgatcggaaacggcacagcatccagagaaacagagcaattcatcgtcaatgtactcagagacatgccgcgcaaaatttattatgtgatcgtcaatgaagcgggagcaagcgtctattcggcttcagagcttgccagagaagaattccctgaccttaaggttgaagagcgcagtgccgtatctattgctcggagacttcaagacccgctcgcggagctcgttaagatcgatccgaagtctgttggtgtcggacagtatcagcatgacgtcagccaaaaacgcttaaatgaatctctgcggtttgtcgtcgaaactgtcgtaaaccaggttggagtaaacgtcaacacagcctccgccgcgctgcttcaatatgtagctggattatcgaagtctgtagcaggcaacgttgtcaaaaaacgtgaggaaatcggaaagttttcaaatcgaaaagaactgaaggacatcccaaggttaggtgcgaaaacctatgagcaatgtatcggtttcttaagagtgcaggaagggacagagcctttggatagaacaggcatccacccggaaagctataaagaaacaaaagcacttttgaaaaaactcggactttcaacagaacatatcggcacggcggaattgaaggacaaaatcaatcagctggcgctctctgaaacggcaaaagagctgggaatcggcgaaatcactctgaaagacatttgtgaacagctgacaaggccggaacgcgatccacgcgataaggtgcctaagcctttgctgaaaacagacgtccttcagctggaagatttgaaagagggaatggaactgcagggcaccgtgcgcaatgtagtggacttcggagcgtttgttgatatcggagtcaaacaagacgggcttgtgcatatctcaaaattgagcaatcaattcgtcaagcatcctcttgatgtcgtatctgtcggcgatattgtgacagtttgggttgacggcgtagatgtacaaaaaggcagagtatcgctgtctatggtaaaataaaagcactgcttacgagcagtgttttttcctatagaaataccagcattgattcagcagtttaatttggtaattatctttttcaaggaacgctttttgcatctgctttttaagccaatttggcataggctcattcctcctcagcttttatcataagagggacagtgattaccatattgtatgcgaacggtgaattgtcccgttcaatgttttttaagtgaggtgcaccatggataacaaagagcttcaaaagctgacagaggatatttctgaaacatattttaaaaagccgttccgccatcaggcgctttttaatgaccggcttaaaaccactggcggcaggtacctgttaacctcccataacattgaattgaacagaaaatatttgattgaacacggcagggaggaactgattggcatcatcaagcacgagctctgccattatcatcttcatcttgaaggaaaagggtacaagcacagagacagagattttagaatgctattgcagcaggtcaacgcgccgaggttctgtacaccccttaagaaaaaagcggaaaacaaaaaaacttatatgtatatctgtacgacctgcggccaacagtatataaagaagcgcgccatgaaccctgacagatacagatgcggaaaatgccgcggaaaaataaaaagaattttttcgtgaaaaaggttgacgaatatggcaagcctatgttacattataaaagtcgtcacgagagataaataaaaacatttacctcttgacactgcaaatcaaggctgatataataagtcttgtctcattattccacagtagctcagtggtagagctatcggctgttaaccgatcggtcgcaggttcgaatcctgcctgtggagccatattggagaagtactcaagtggctgaagaggcgcccctgctaagggtgtaggtcgcgtaagcggcgcgagggttcaaatccctccttctccgccataagatttcgatataagttctcaaccatcggcccgttggtcaagcggttaagacaccgccctttcacggcggtaacacgggttcgaatcccgtacgggtcattccatttcgttgggctatagccaagcggtaaggcaacggactttgactccgtcatgcgttggttcgaatccagctagcccagccatttttatttttgaaatctaatagtaagagccattagctcagttggtagagcatctgacttttaatcagagggtcgaaggttcgagtccttcatggctcaccatttgtctttttgcgggtgtggcggaattggcagacgcgctagacttaggatctagtgtcttacgacgtgggggttcgagtcccttcacccgcactttatttacaaagtgcacgcaaatctgttttactaggttaagagcctactaaaccagcacaacacaatttaatgatcacgcggtcgtggcggaatggcagacgcgctaggttgagggcctagtgggtgaataacccgtggaggttcaagtcctctcggccgcatcaatgataccaagggttttgacacccttggtatttttttgtgtttattttcaaatgatttactgcccacaaactgcccacttacctaaagtaagtcatctaatttatcagccatttccttttgcttgtttggatataggtgtccataaacatcaattgttgtttttacagaaccatgtcctaaacgctctttaattgttatgtaatcttctccttggtgtattaatagtgcaacgtgtgaatgtctaaaatcatgtaaacgtataggagtaagatcgctatccttgcaaaagtatttaattttccgactgaaaatatcttttcttgaaggtgtatctttatattgaaagatataggtatcatgtgaatgtctaatacctaattcattaaacaactcttcttgtgcttctttccaacgttctagtagcttaagcaattttttattgatgctaactcgccgaatcgaatttttagtttttggagtagtaacaacaaattgaccatcaagccaggtgcacgatttatgcacatctatttctaataagattttgtcaatatctttccattgcagggcgagcatttcaccacatcttagtccagttaaaaaagcaacagtgtaaaaggttttaaacaataattgatcttgaggaattaaactaataaattttttgaattcttctggtctccaaaacttcattttctttcttgttaaaggtaatcgtttaacgttgtcacacggatttctttttaagatttcttcatgtacagctgtatcaaaaattttgcttagactagtcattatattattaaccgatttattgcttagacctgtttccattaaatgttttctgaaatcagttatttctctatgtgtgattttttgtatatcagatttcaaaaagtaatcagatatatgtttgtttataatgtacttctgattctgataatagtttggtttactatctatttcacaacttgctaaataaattgaaattagagtcggaaagcttactgatctggactttcttgctctttcttcttgaaattctcttcttaattttgcttctaattctaaagcctcttttctggttgatgctactggtctcgtcctaattctttctccagtaatcgggtcaaatccaaagctaacgtcaacttgatattgaccattttcaagtttttttacagacattttatttctcctttaaccaaaagcgcttatttcgtgtgaatagattctgttactaaatgagccaatttgagaaagtttataatcagtaacaaatgatggtacgttgaagtatgctgctatttgttctttgctaaaaccctgtatatatggaagggcttcattaagcattttatctgtcagtattaattctgatgcaaataggcttgcttgatgctcaagtttatcttttagaactttagagcaattcacaactttaaaagtgttcaatcttttatggagaaagtaatgccctaattcatgggcaattacaaattgttgatgttggaggttctcgttgatatggattaaatattgatctgtggctttgtcatgttgtagtaaaccgtttgcttgtccaagatcatttttgagtatataaattttttggatgtcacaaatttcatagacattatttgtaccatgtgtcttaattactgattgcactttatgtttaattcctttgcttgtataaattgttatcactctttcttctttaattcgtcaatgaatttaattccgttttttaatgcttttttaacaaggcgtgcagtttcctcatcaaattcaccatcattcataaaaaggagtgtatcttcatcctttaattcctgtatggcttcattaattgttttattgagtaaatcagtttcgtttttcttgcttacttcatcctttcctaataaatagtctgtagatacgttatataagttgctcaattttaagagtgtgtctgtatcaggatctctgtaatctctttcgtaattagacaagttattgttaccgatattaagtttctctgcggcttctttctgagtgtacccagctttttgtcgagcttcttttaatcgtttgcctaggctcatttttatcatccatttcacaaagagttgatttttataaaaataataacaacattttttggagaattcattaatttcacctataagttaaataaataattctaaattctccttttaggagtgtttgtttcttctttatggagagtttaattatcaatatttccatatatgttcaaaaaaatacactttaaggtgaattttgtgttgacttacacgaaaaggagttttataataaagttaattcacaaagagttgagttaacgaggaggtgatattttgaaaggagagtttttaactgcgagagatattcaaaaaattcttggagttaaacaggctaaatcttatgacatcattagaactttgaatgctcaaatgaaagaagaaggatatatggtcattcaaggtaaggtgagtagagctaagtttgaagagtgttattgttacaaaggcccaaaatctcaaacggggtgatttttataaacattgatataacaaactcgtttatgaaagaagctgtccctttagctagacaaatggaaggtgattggatagcacgaatgaaaattgctctgaattcagtcattataaatcattatttaaaccttcccttaacaattgaaaatgttaatgaattactgcgaaaaggcgtttcatatcgcaggatatgtaagcattacggcattggaagaaaagacattgaaaagcttcggcaatcatccgtagtgtgacgttatataccactatagggagccgttaagaatcctttgaaaggagggatgcgatgaaaataagagtgaatgcaacaatcattactgatgttgaagctttaaaggctgataaggatttgaatcattttaaagactatgccacttgtgaaacattcgttgttgatgctgataatcatttgaaggctaatgaagaaatatctgagttgttaaaaggctgggattggtggtgtatctggtcaactcgtccattgagtaaaaaggataaccaagtgtttactttgtataacgatgatttgtataacttatgtcgataggagtgtttgttccttgaaaactacatatagacaaaaaaagcgccttgacgaatgatcatcaagaacgccggaaaataaaaactagacacttttattatacggtattcttgttgaaatgtcatgcgtgagtatttgagtgatgaacagcaatcactttaaatgctgtagcaggctagaataagcgtgcggaatagctgtagtcagcttgatggctataattagcctactaggttgccatgagggcgtaaagccgttagcaactgataagcgccaagatggatacagaaccggagcgaatcaaaaacataaaatcgaaattaatgttcttttgtaaataaattataaaaaaatgaaatggggatatgaaaaatgaacttaaactttattgtaccggatatcaatatgacttttggagacatgaaattcatgggacttaacagagaaaggtatgtttatgatcgtgaaaataataagcgtactgacgtactggaatctaggatttataacattgctagtgctgtccaaggtggtcaaattgaagtaactattcctgagtatgctggggcaaaagaaattcctccttttgcagatattgagttgaaaaatccaaaaattagcgctatggcgactagtcaaagggattcgacgtatgccaatgtgatgtggaaacttgaagctgatgatattgttgttaaaggtggctcttctgtgaaacctgccgcggcaactggcgggaatgaaaagaaataacatgatgctctcatatcggcaggcgggtgatgtatatgagtgatttcttaaacaaaagattttggaaatacaggggcaaacgaatccgcccgtacatgagaaacaacgtaaagttagcaggcgcaatcatctttgtgcctgtttttttattgtctatgttccttttttggagagaacaactcattcattttgatctatctcaagtgataaaaaattttgaatggaatgtgcctttaatcattaaaagcgttttatgctctgtgctaattgctgttggaagcatagttgcatcttactttcttttgtttgacagctataagaaaatccttcacaggcaaaagattgctaaaatgattttctctaacaagttttacgaaaaagaaaacgtgaaagtaagaaaaatcttttcaaatgaaactgactcaaaggaaaagatcacatactttcctagaatgtattaccaggtcaaaaacaaccacatctatattcgtattgctatggacatgagccgttttcagaatcgcttcctagacttaggaaaggatttggaaaacggcttattttgtgacttggttgataaacaaatggaagaaggttttgtatgctttaagcttctttacgatgtcaaaaagaatcgtatttccattgatgatgcagtagctgagaatggagtccttccgttaatgaagcatatctcatggcaatttgataagttgccgcacatgcttattgctggtggtacaggtggagggaaaacatacttcatgctaacgatcattaaggcatgtgttggactgggggcagatgtaagaatactagaccctaaaaatgcagatttagcagacttggaagaagtacttccgaaaaaggtctattcccaaaagaacggtattcttatgtgcctgagaaagtctgtagatggcatgatggaacgaatggatgaaatgaagcaaatgtctaactataagacaggtgaaaactatgcttatttaggcttaaaacctgtttttatcttctttgatgaatatgtggcatttatggatttgttagatatgaaagaaagaaacgaagccctttcttacatgaaacagttggtcatgttggggagacaggcggggtattttctcgttttaggcgcacaacgtccagatgcaaaatatttagctgacggtattcgtgatcagtttagctttcgtgtttcattgggtttaatgtccgatacgggttacggaatgatgtttggcgatgttgaaaaagcatatgtgaataaaaaggagacagggcgaggatatgccaatgtgggcacaggttcagtgttggagttttacagccctatcgtgccgaaaggatatgattttatgtcatctattaaaaatgcgctggttggagtcgagggagcgcaggcgacggcagtcgccagcggcagcgtaagcgaccagacggccagcggcgaaggagtgagcgaagcgaatggatgagctaaaacaacccccccacgctaacaggggggtagtaatcgtaaaagaaaaaaatgaagccgttgaaagtcctttggtatcaatggttgactatattcgagtctcttttaaaactcatgatgttgacagaattattgaagaggttcttcaccttagcaaagactttatgactgagaaacaatctggtttctatggctacgttggcacgtatgaactggactatatcaaagtcttttattctgcgccggatgacaacagaggtgttttgatagaaatgtccggtcaaggttgccgtcaatttgaatccttcttggaatgccggaagaaaacatggtacgacttctttcaagattgcatgcaacaaggcggttcgttcactcgctttgatttagctattgatgataaaaagacatacttttctataccagaactgttaaagaaagcccaaaagggcgaatgtatttcacgatttagaaaatctgatttcaatggctcctttgatctatctgatggcattacaggcgggacgacaatatatttcggttctaaaaagtcagaagcgtacctttgcttttatgagaaaaactatgaacaagcagaaaagtataacattccgttagaagaactaggcgattggaatcgttatgaattgcggcttaaaaatgaacgtgcacaagtggcgatagatgctttattgaaaacaaaggatttaaccttaatcgctatgcagatcattaataactatgtaaggttcgttgatgctgatgaaaacatcactagagagcattggaaaacgagccttttttggtctgattttataggcgatgttgggagacttcctttgtacgtcaaaccacaaaaagacttctatcagaaatcaagaaactggcttcgtaactcttgtgctcccactatgaaaatggtgcttgaagctgatgaacatttagggaaaaccgatctgtcagatatgattgcagaagctgaactggctgacaaacataaaaaaatgttagatgtgtatatggctgatgttgctgacatggtcgtttaaaaccaagctgctaaaccttaataaacacaggtgatgcgattaaacgtatgtgtcaacggtaccggaacgaagtgaggataaggagttgacatattcagcgctacccaaaccctcttggcattgaacaaacaaccgtttgttcctgcctaccggcgagggagtcccccgatgattcgggggaatagggggatagattaacagcaatccaacgagctaccgttggtgggtttgggtgaaacccaagaactaacttggagggataagatgcataatgtcaatctgttgaatcaggctggactggaaaatgctttggaatcagttggctgtttagatattgtagaagatttaatagaaaagatgcaggaatatgttttgtatcataccgaaactgccgaaagatttgcgattgatatctttacagtagtaaacaactacactaaaaaggttcatgcgatatttaatgttcttgaaaatgaagacggtgagacaaatgttaaaaatgtagaatttgaagtaatgcattttacggagtaaggacaattttccttatgactttaaagggggaacatcaggtgtttaatattaatctgttgaatcaggcccgacttgagagtgatttggattcccttgggtgtttggatattgctgaggaactgattgaaaaaatgatggaagatgttttttacagtgatgtagctcaaagaatcattgttcaaacacttgctgttataaataacgccaatgcaaaacttcaagctacgtttaacatcttagaagatgaagatatggagacagacgaacgaagcgtggagtttgaaggaattagctactacgaataaggggtgaaaatgtgcggtgtctgctgtagataaacgattcaaaagcttaggttttaatgtgggcattccctctttagtttttgtgagaagtttaagcagagattgcatgttggttgttgaaggagaacgagtaaaaggatttgctgagtatcgttacacattctataaaacaagatacttgccagacggtcgaatgactagcttaaaagtttatatggagaatcaaagcataaaaagggtgttacatcgtgtagcatcctttttatctttcttggaaagaacgaaacaaattgaacagaaggagtgtgaaaaagttgctcaataaagaaattggctctgataagaaggaagaatccttttttcggtctgcttttcaaaaactgaaacgaattgaaagaccggaaaaagacaaacaaaaagtaccccgtgacaggtcaaagctgatagccgtcacactatggtcttgtgtagggagcttgctatttatctgtctgcttgctgtgcttctgtcaattaatactcgctcccaacttaatgacatgaaagacgaaacgaataagccaacaaatgacgataaacaaaaaatttcggtgactgctgccgaaaactttctgtcagggttcatcaatgaatatatgaatgtgaagaacgatcaagaatctattgaaaaacgtatgcagagccttgaaagctatatggttaaacaggaagataaccattttgaagatgaagaacgcttcaatgtggatggtttaaaaggtgatcgagagttaaagggttacagcttatataacgtgaaagaaggtgataaaaacagcctttttcaatataaggtcacatatgaaaatctataccctgtagaaaaggaagttgaaaaagaagttaaagacggaaagaagaaaaagaaggtgaaagaaaaggttaaaacaaacgagaaatacgaaaaacaaatgttgctgaatattccagtcacaaataaaggtgattcctttgcggtgtctgctgtcccttattttacacagatttatgatctgaaaggcgatattgcttttaagggtaaagaagaaactagagacgaatatgcaggcgagaaaaaagaatctatcgaatcatttcttcaaaatttctttgagaaatacgcttctgaaaagaaagaagaaatggtttatatgatgaaaaagccggaagcattggaaggaaacttgttatttggggaagtgcagtcagtgaaaatcttcgagacgaaaaaaggtttcgaggttttttgtgctgttcgatttaaggaaaaagaaaatgacattccggtaaatgaaaaattcagtctagagattacggaaaacagcggtcagttttatgtaaataaactcaaacatcaataggaggtttaaatatggatttcatgaatttctttattcttggcgcagaccttccaacacttggaggggtaaaaggttgggcatcagatgttgttatccaattcattacgattgtggtcatgttcatagccgcaaagaatctgatgaaattaaaaatgggcggcattatctttgtttgctgtattggcagtgcggtaacgtgggttattaaacactggtcagaattctccggctggatcaatgcgctaatggaaaaattgtaagggggcatctgaatggggcgtctggtgttcaactaccggaaggcaatgagagagccgaaaaaaatccaacaattaaccgaaaattattcgttaccctttgcagttgagttaataccggctattaactatttcatttttgttggcttatgctttggattctggtacggcgtgaggatgattttccctcacgcttttgataacagttacgtcattgtgatttttgggataccattttttttaacgatgcttgtaacgaaaataaagccggaaggcaaaaacatctatatatatttctttgatttcgcaaagtattacttcttcatcaagcttccacaaaagaagtattgcaatgatcgaaagattgatttaagtaacgaaaaacaaattgagtttcgaaaacttgtgaaggtggtggattattcaaatgagactaaaaacgcctatgaaggcaatacacaagaatttgctgttaacaagaacgggcgacgtgtgggcgtactaccgaataaaaagcaattcgattcctatgcaaaataaagaaaaagttgaatcgtataaaaagaagtggcagcatctttttgaagaaattacatcttatgaggattttcacttgatgatgtatccaagtgagtatgaattagaaaaacgatttaaggatttagaaacagatattgcggcagatgcaatggatgtggcacgttactacaatgaagaaaccgtaaggctgttagaacagcgattaggaaggctgacaaagtacgacttcattttaggtgtaaaactgaaaagcagtcttgtaaatattagtgtcgaacttaaagacaatatactatcttttttcaatacagcgactgatacagtcgtgaaaatgctcgggtgggaacaaaatgtttccacctctttttttgaaaaatatgaggaagtcgaagaaacactagcgaatatcatggcttctgttcgcggagaacggctttcagaaacagaaatgacatacattaaccgttatcactttgtacgtgggttaaagcaccaaacgaatgaagaaagtgagataaaggatgttcgctctattacaaacacgatcatagaccccactgacccatcagtattgcatttgcatagtgatcaagatgaaggctattcagcttttgtcgtgattgacgaatttcttcacaatatgtcggaaagtgatttgttttatgaagcacagtctcttcccttccctgttgaagttcagatgaaaattcaaacggaatcaaagtccattaccaagcctgccctcaacctcaaaagacagcaattgaaagaagaacaaaaagaacaacaaagcacaggcgatcgaagtgatgtttccactgtcacaagtgccacaatgataaggcatttacaagatgaaataaagaaagaagatgtgcatgtgatgaactggctgtcggtgatagtcgttcatggaaagacaaaaaaagaatgtgtgggaaaagcaacgattgtcaaaaggcatttaaaaggcgctggcattacttgtcggcttccggtggctgatcaattgaaccttttttataaaatgcttcctggtgaaaagttagacataaccgataagaactggattcaaaaaacaacgcaagacggtgtggctgaaagtctgtttgctgttaactctgatattggttcgaaaatcgggttctttctcggttgggttgatcgtttccaagagcacaccgacttagaaagtgccattatgtccagccgtgattttgtcttattccaccctttcttagcgaatcagcagttaaaaggttcaaagacacgttctcctcactgcttaatcacaggagacacaggaaacggcaagtcatatctagcgaaattgatctttaactatatcagcatgttaaacatcaaatctctgtatatagaccctaaaaaggaaatgagaaagtggattcaaagagtcttgaatgatgagtacattagagagaactttcccttatatattgcacatttagagaaatacaactatatcacgctagatcatgaaaacacgcacaactggggagcgcttgaccctatctccttcctccctcctatgaaagcaaaagagctagttcaagtcatttttgaacaagtatatgactttaaagggaaggacgacataaacacagctttccttcgtgctacgtcagaagtgattgatgcgaaacaaaaaggtgaacaggtcggctcacttgatattattcggaagatgcagagccatcccgaagaagctgtacaaaaagctggtgactatttaaatgaggtcgtgtcagattccattttgaaactttgtattcatgatggttcaaatcctgcattgtcactagaaaagcgaattaccattttagaagttgaaaatatggatttgccggatcatgctgagcgacttgaaaactacacgatatcacaactaaagtctagtgcggtcatgtttgcactaggtaagttctgcgagctattcggcatgaatcaagacgaacagactgttgaatttatagatgaagcttggatattcaccacgtcacaacaaggaaaaaaagtagaaagacaaatgcgccggattggtcgctcatacaacaatgcggaatacttcatttctcaatccacaaaagacgctttaaaagaagaggattctggaaactttggcgttgcctttgcttttgacgaaccaaacgagcgtgaagaagtgttgaaatggatgaacatggaggtcacaaaagataacaaaaaaatgatggaatccatgtttcaaggtcaatgcttatttaaagattactatggccgcacctctaaaatttcgattgaatgcctattcgaagaatggcaaggtgctctgaaaacagttgagaaaaaagccgtcgcatatgcggaagaaaaatatttgtaaaaaggggttgaatcgtacatggaaatagctttcttaaactctcttgttgtcacgagtccaggcttttataaagctgagaaaatcacattggacgaagttaaacaatggctgaagcattatgatggtcgatacaaaagttttatcggacataaatcaacggcacagtttctgcaaaaattattaggtatcagaattgagcaaaatcgaaagactttcagacatatgaaatatcaaaaagcaatctgtttctctctgtatgaacgatatcctgaaaacgtgttgctaacgcaaagagacttagagaaagccagataccaattttatttattaactcggttagattaggaggtggttgtaatgaaaaagaaaagaattttgattgtgtcggctattgtgttgctgtttttaactgttgcttcagctgtaacggtattttcggctgatggagatacaacgacgcagccaaaagtcgaaaaagctggcggcgtggaattgaaggtgaaaaggtttccaatctcacgctatcaagcgaataatgaagcatctgacgatttaatcaagggggcgtttgttgggctgacaaacgtcactttttcttttgcgggaaacattgtccgtgtggttgatacggggatggatattttgtataacttgcaaccgattgacgagttcgcaaattctattacaaacgtctctaaaacagtttataaaacactgaaaaagaatttcggtgaagctttatttattttcacgtgcgcctatgttgtctacctattctgtgtgagaggtagcgtaaaagaagcaatgcggcggagtattctatttatttgtgtcatggtgatcggtgggctttggatgtcgaacgctggttattacatgaaagtattgaatgccttgtctgtagaagctcaaggaaagcttttaactgcggggaatggattggttggcattgttcaagatgaaggcaattttgcagacagttcagcgattgaaaaaggaaaagaaatggaaggcacagttgcggttatgcgtaatctttactttgacattgctttgatgaagccttttttaattgtgaattttgatgaaacaagcgaaaagaaaatcaatgaggaagatacagataaaggcggacttaatcgtatagataaactgctttcttataagctttcagaggatggagaaaaagataaaaaagattatataaaagagactgaaattgatgattataaaaatgaatctatgacttctggaaatgtgtttaatcagctgggagagtcttttatcgctgtggtcgcttctattgtcattgggataccatttttagcattagcgttctttaatttcttgcttcaagttgtcgctttagtgatagttttctttgtgccatttgctttcatcttagcgtatgttcctcaattagcttattcgggatttgttacgcttggacgcttggggagtgtttacctactgaaagcaatgttaggggttatcgttctgtttgtgtacgtgacttgttttattgttgacaagttaataccgccaaatggttttggaatgtatcttttaaatgttgctgtccttgcttcaatcttgtggattggttttcacaagagggatgccattatcaagtttgtgactgctggaaaagttgtttcagttgataataatatgatggaaaacatgagacaaaacattgttcagcctgcttgggaacaagcgaagaaaataggtggagtatggggtaacggaggcggcgtatttactgactttacaaagcattttgggggaagaaaagacggttcgaatgctgatggcgtaactggtgctccaagtggtggcggtaattcaccgagtgggactgctatgggatatgataatactcatgctatttcaagaaccccgcaaaaagaaacagctaacggaatagctaatcataacagtcgaagcttaaaacgcaatcctcaaactctatcgaaagaacaagaaaagcaaaaacaaaaagaagcctttgcaaatgcaaaagaaaataaacagcaatcccatttagccagattgagaaaagacggaataaactctcctatgttgaaagatgctttgaatgaagggaatgaggatttatccaaacgagcacctatcttgcaggataaaaaagatgaatcagcacgaacagatcaaaaagaatatgtggaacagcttcttaaacagcccaataaccagcaacaaactgacgatgcatcattacagcatgaagaagaatctacttctaatcgtgcgcctgtcttacaagagaatgaaaaagatacagaacgtactgatcagaaagcgtatatttatgacgaacaaaatcagaatcttgaaacagatcagcaacaagattttgaagtccagaaagatgattctgtttccaatagtgagcctgtagcacaagagaaaacagcagaaatcaaacgatcagatcaaaaagtcatgatgaatcaacctgaaccgcagctcggttttgaaagtcctcaatctacaaaagtagaaaatcaacctattgccaataacgaacgtaaaatcagaccatctgaacccgcaaaagttcattcagatggtattcgtgttgatgaaaaacaggctgttgctcctgctgaaaataagactgtatcaagagaaaaacagccttcatcacaaacaattaaacggactgaacaaagcgttaattcatttgaccaagtgtctttgaatgaaattgcaagacgctcttcatcaaaagtagaagatcgactgagaagggatgaaagaacaagatgataagtaaaaaggtagttcttcctttggtattctcggctccttttatcttcttttttgttttatgtatcgtagtggttatgacgatttcaagagaaaatcaagtcggggacgattttataggcggcggggatggcgaatatgaaacagttggaattgcgccggaagtggaacgatttagagcagtatttgagaaatatgcccgtcaagaaggcgtttttgaccaagtgaatattattatggcgctcaccatgcaagaaagtggtgggcgttctttagatatcatgcaaagttccgaaagtatcggcttacctcccaactccataactgacccagaacgttcaattgaagtcggcattaaacattttaagaaggtttttaaacaggctggcggtgatgttcgtttaaccttacaggcatacaactttggttctggatttatagactatgtcaaaaagaatggcgggaaatacacaaagaaattagcacttgatttcagccgattgcaagcttttaaaatgggctggaaaagctacggtgacccaagttatgttgaccatgtcatgaggtatgtgaaaggctctgataaaaatgtgaagcctgtgaaaggctctatggatttctatgaaacggtcatgaaagaagctttgaaatatgaagggcaaccgtatgcctggggaggttcaaacccggaaactggatttgattgttctggccttgttcagtggtcttttgcgaaagctggaatcactcttcctagaacagcacaagaacaacatggggcaaccaagaaaataagtgaaaaagaagcgactgcgggtgacttagtgttctttggcggcacatacgaaggaaaagccattactcacgtcggcatctatgtaggcaatggcagaatgtttaattcaaatgacagtggaatccaatattctgatctgaaatcaggttactggagagatcaccttgtatcttttggacgcattaaataactaggagtgaaaatatgaaaacacatattgcatgggcttcagcttgtttattattagtcatgttaactggatttttcacgattggacagcaaacgtataagattgaaaagttaaaagataaaaatgaagttttgagcgaaaaaattaaggaattgaaccatatagaatcaacaagtagcgcttcggaaaataaggcattttttgaagcgttttttaattactccgacatagatatacgatatgaaacagttaagaagcacacaactggaaaagggtttgattatgcattcccttctcgttctgatcaaaagcacacagtcagcgtgcaaagtgaattactatcactagagagttattcaaagccgttagatgagtctcatgaattgtttttaaacattgttgaagtcgccacaactgcaaattcagtcactacgaatcaagtgttaattgtacaaacgactatgaaaaaagaaaaggatggttggttagtcgataatgtgcaggttaagggaaatggataaaaggtggaaaagatcaatttgtttgtttatactaaatattgaaaaaggaggtaatgtttattttgaaaaacctttttattttccttagtttgatgatgatgtttgttttaactgcatgtggtggaagcaagtatgatgatgcgattgatgatgtaattagccaatataaagagcataaaggaaatgacacagagataaatattaaaagagagaatgcgattgttagagtctatgaagggggcaaatatattcagtttgcattttatatgccggataactcttcacgtgaattaacaacatttaagtattatgaaaaatttggagataaatatgaaaagatgactgatatgccggggaatggggaaaatgatcgtctggggttatcaaagaaaacaccagactatgaagaagtaaaaggagaagagacagagttagaggagtaaaccgtgtgtttactcctcttttagttttattgacattggtaaaacagagatagggtaagaacttagctaattaagaatgaaaattataaggtttataagttggaaactaaatcaaatatgtcttctaagaatagatttatgggtaaaagttgtttttacactattggtgctactagcagtggcatttaagttattttaatttcgtattaaatttagcctttatcctttcccattttttatcttctaatgtgagatcatacatacggagtattttttcttttaaattaaataagtctattggttcctccaaggagaatgcttttttatttttatcaattactccttttatttcgcccttaaaaccagggaggatgaaagtagagcagttattgctattcacccaagtagcccccatttcattaaggcagtatacgctatcatagtaattatcggataacatataaaagacatatgcacccttaaaaagatgtttttttagatattcgaaaatatcttcatctccaggaataccatgataaggtgaagaagtgtatattatatcttcagaagacactcctatatcctctagtaattcaacgaaagcattacatacaattttgtcttttgaggagtggctaataaatatttttttctctaattctctattttgatcacttgaaaagtgagttatgctgcttttttcagtctcatctactacaggcaattcatctaaaaatttttttattttattttctgtttcatgatgttcaaactcattaaaaacaaattcatttttatatatttcattgcggtttcgtgcataccaagtcttaagttgttctagtgaataacgaattaactcaatatcatttgattcaagagatgttcgaaattgatcaataatatttgtgagtacaggctcgcgagagtaatctagaagtactcctataattccattagcctcaaattttaatttttttaatgtgtccattagatttcctccgacctaatttaatccattgtttgtaaacatttcatatctaattatataacatagactcctattctaactacttattttaaagcagtctggattgtttgggtaattcataaaaaaataaaagaaagaaggaggaatagagtttttcttttttttgtttgcaatgttactgtcaagtcgcaaaagaattgctatgaccgaaaaaaaaccgcaaaggaatagatataaggtacctttttgcaattcatctttgtaaaataaaggttattctgacataatacaattaatgtaaaaattcgcacaattttatgtaaggatgggggaattttcttgcggggtgttttcttagataaagataaaattccgtacgacttagtcacgaaaaagttaaatgaatggtatacatcaataaaaaatgatcaagttgagcaagccgagattataaaaacagaagtagagaaagaattgttaaacatggaagaaaatcaagatgccctgttatattatcaactattagaatttagacatgagataatgctgagttatatgaaatctaaggaaatagaagatctcaataatgcttatgagactataaaagaaattgagaagcaagggcaattaactggcatgttggaatactatttttacttttttaagggtatgtacgagtttaggcgtaaagaattaatttcagcgataagtgcttatcgaatagctgaatcaaagttgtcagaagttgaggatgaaatagagaaagcagagttttttttcaaagtgtcctatgtatattattatatgaaacaaacatacttctccatgaattatgcaaatcgtgcactcaaaatatttagagagtatgaagaatatgctgtccagactgtgcgttgtcaatttattgtagcaggaaacttgatcgattcattggaatatgaaagagccttggaacaatttttgaagtctttggaaatttccaaggaaagtaacatagagcatttaattgcaatgtcacatatgaatattgggatttgttatgatgaattgaaagaatataagaaggcttcacaacatttaattttagcgttagaaatttttgaaaaatcaaaacatagtttcttaacaaagactttattcactctaacctatgtagaagcaaaacaacaaaattataatgttgctttgatatactttaggaaagggcgatttattgccgataaaagtgatgataaggaatactcagcgaaattcaaaatattagagggattatttttttctgatggtgagactcaattaataaagaatgcattttcatatctggcttcgagaaaaatgtttgctgatgttgaaaatttttcgattgaagtcgctgattattttcatgaacaaggaaatttaatgctctctaatgaatattatcgtatgagtattgaagcaagacgaaaaattaaaaaaggggagattattgatgaaaatcagccggattctattggcagcagtgattttaagtagtgtattttcaataacttatttgcaaagtgatcataatactgaaattaaagttgctgcagatcgggtaggggcatagcttagataattggaaaagaggaaaaaagcttaatcttttttcgaaggttaagctttttcttttatttataaaaagtgaactaactatcagaaagaaattatattaaattttatttttttgtttaaaaagtagattatataaaggcaagctaggtgggggaaaatatgtttaaaaaagaaaaagtcacagaatacatttggactatactaataccaacaatcatcacttttatcattagttgggttgggtcttattacaatggtacttcgacagttagtattggacaacctacaaaagtttccggtcagtatatcacgccaataaatataagtccctatcatgatattaaggaattaagaataacttttccgcaaaaactagatgtaaaacaaattagttcaaatgagcctataaatgtaaaatcagataagaacaatataggagttgaaagtaattccacttttgagattgcgaaaatcgttgaaaataatagcgttcagttgctaattacaacacaaaaaaagttaaacgataaggaaattagaattgataaaaatggaaataacatttctgtaaattatgaatctcagattgttaatcctgcaaaaaaacaattaatcaatcttataattacgtcatctatttattttataatgcttaatatactagcattgattatgaacaaaagatgggataagtattatgcaaaaatgaaaaatgaaatcaaagaatttgaggataatgcaaaagatcttgataaaaaatcaaagaagaaaagcgaggaattatcggagctgcgaaagaccttgaaccaagcgtttgaggaaactgataggataaaatatcatgagaagaaaaaacaaatcctcctcttagctaagttaaacgattataaaaaagaactaaccttttggagaaatacaataagaaaagttctttatgaacttcctgatggagataaaaaagcagataaactaatagggacagttacatcatctttaaaaacgtacggtacagtcgaaaaaaacgagcatgattatgaaagtttaaaagtagcagctgccttactaaatgattctgataagagatcgtaatgtactggattttaataaactattagaaagaagattagctgcaaacatcagaacgaccaaacaatggtggtatgtttatagagtttagttgttgaaaagggcgaactatgagtttgctgcccatttactgcccagaataaataacaaatcatgaaaatcagtgtaaataaaataacttaatgctataaataaaggcttttgtaaataaagatatgattttactaggttgagggcctagtgggtgaataacccgtggaggttcaagtcctctcggccgcatctcaataataccaagggtttaaccacctttggtattatttttttgtgtggaaaatacggctatgggagaagacttgctcaccaaaactcaccagttacttaaagtaagtcatccaaacggtcggcggttccttctgtttattaggaaaaagatatccgttcattgtaaaagaaacgaaccatgtcctattcgttcaaaaaaactaaagggtgatacatattatacatgattaatatgtatcacccttttctttcttgttcaacaatcgcgcttgaggagaacataagctaatacaactgactcgatttctaaagttgctccattctttttttaaacaactcatccacaacctgttttaaaatctcgtacgactgaatttccttgctcaattcgtaaatattagataacacaattaattcatctgcgtgatacatttgttggaaatcaattagttcgcgacgaattgtttctcgatcacccatgattgtataccccagtcgactgtggagaatttctaattcaaactgtgataacgattctaggaagttttcagtgggtggaataagcttacttaaattatttgtataaatatcaatatacacctgcaaatgacttgcagaaataaaagatgcctcgtctatagattctgctgcaatcacattaatgcaagcgatcacataaggttcttgtaaataagaagacggttggaaattttctcgataaatagagagcgcttcttccatcgaatggggtgaaaattgagcgccaaatgcatagggtaaaccaagctttgcagcaatttccgctgaatccgttgaggatcctaacacaaaaacaggcacatgcgttccaatacccggataagcgcgaacctcaccctgtacactcttatccccgacaaaacgcaaaatatcatttacttctctttcaaagaaaaacactccattatggttggaacgacgaatcacatcggccgttttttgatccgttccgggtgcgcgtcctaatgccaaatctacacgatttggatataatgtttcaagtgttccaaattgctccgctacgattaatggggaatgatttggcaacataataccccctgaacctacgcgaatgtcttttgtatttgctaatatatgttgtacaattgatacggttgctgcacttgcataagcgtcgtgattatgatgctctgcaaaccaaatccgtttatagcccatattatctacagctttagctaatgacactgcagaatcaatcccttgtttcattgtttctccttgtcttaatggagcaactgataaaacagatatatcaaattttttcataatttcacctctaaaataatgaacttatacaagatcaatggaaaaaacattttgaaaaattgtttcatattaaatggtgtccattcctctttgatttgcatgcaaataaatatatactttctcaaacgatcaatacataggcaaaataaagttatttcacaatttcactttacttttaaagttttaagcaaacataaaaaaatgttcagtgaacaaaatatgtaaaatacatcttatttttcagaaaggatacaagaaaatgattgatgaaatagataaaaaaatacttgatgagctgtctaaaaatagtcgccttacaatgaaaaaattaggggaaaaagtacatctcactgcaccagcaaccgcatcaagagtagtaaagttaatagacaatggcataataaaaggatgtagtatcgaagtgaatcaagtgaaattaggcttctctatacatgcttttcttaatatttatatcgaaaaaatccatcatcaaccctatttagcttttatagaaacacaagataactatgtaataaacaattataaagttagtggagacggttgctatttgcttgaatgtaaatttccttcaaacgaggtattagatcaatttttaaatgacttaaataaacatgcaaactataaagtgtcgattgttattggtaaatagttaactttataaaacggagatgtgcggtcatataacatgatatatatgctctaaaaaagccctaggttggatatggaatttaccaagctggggcctttttatacattataataacaagcgcattattcatcagacattaatgaagtattataatgcttttttacttccttaatagacaaataaagctgatagtttccatacttcaataaatcattcagaaggtgatttaaaacttcttgtgaatgaaccgttaccttcagaagataacatgcatctcccgaaacacgatgagcttcgctaatttcattacgagtagcaataaatttcaataaatcatcatgcatatatgcattcatgaaaaagaagacaaaggctgtaaaagaaaaccccatcttcaattcatcaaccacaatcgaatatgctttaatgataccgttatcctccatttttttgatgcgattgcctaccgcttgtcctgtcatatgaattttttcaccgatttctttccattgtatccgagcatttttatttaataattggagaatttgaaaatcaattgaatcaatttgcatagtaactcctttcacagtgaaaaagttttacaaaatagtatttcatgagaccatcgaaaattcaatggaaattatatatccttatacagtataaaaattttaagaggtgaaaaaatgacaacagctttattagtgattgatattcaaaatgattactttccaaatgggaagatggctttaacaaacccagagaaagcagcacaaaatgcggctaaactactttcacactttagaaacacaggcgcacctgtctttcatgtacagcatatcacagaaggtaacatcgctcattttttccatccaaatacagaaggtgtcgaaattcatgagtcagtacgtccattagagaaagagacagtcattgtaaaacatatgccgaatagctttttcaatacagatttaaatggaaagctacaagaagaaggggttaaagaattagttgtttgcggtatgatgtcccatatgtgtattgatgcaacagttcgttctgcagttgaacatggttatgtatgccaagtggtagaagatgcttgcgcaacaacaacattgcaaattgaagataaaatcgttcctgctgagcatgtccattacgcatttatggccgcattaaatggtgtctatgcaacagtaaaaaccacagaggcatttttaaaataaaagaatttcctgcgcgaacataacgtctttcttttcacaagaaagatgattcaacaacttaaaaaaggatgttcagaaaaatacttctggacatcctttattcattatcttttattgtttttcagtatcattattcccatctgataaaagatcaagatgtcctgtttttgatccatagtaagaccatatacagggattgtttttgccataaatatagatattgatgaaggtttacataaagcacctaattgcttgatttactttaatgttagatccctcaataactccattctcttctaatttctctactctagctgtagctgctgggcatgttaaatgtactctctcccagatctttcattgaattcggctattatacataatttctctataattttttatctgtttgatctatttgaacgttaattcctttcgaaaataaagtcaaagagttaaaacacttttttttatctatgtattcgaacactgctgatattatacacttaactctgtcgatctaagacaaataaaaaaagaaagtgagttgtaaatatgaatattacacaaattcgaaatgcaacaattgttgtaaaatacgcaaataaaaaatttttgatagatcctatgttagcagagaaaggtacgtacgctactttccctgaaacgatcagacaagatttatttaatcctttggtgagtttgccaacatcaattgataacattctggatggcgtagatgcggtaattgttactcatctacacctagatcactttgatgatgtggcaaaaaacgtattgccaaaaaacatcaaaatgtttgttcaaaatgaagcagatgcaaaagaagtaaaagcaagtggtttcaaaaatgtagaagtgctacatcaagacactgtttttgaagggatccaattagtaaaaacaaaaggtgaacatggcagaggggaagagttattaaacttaatgggtgatgtttgtggattagtattcaagcacccaagtgaaaaagttttatatgtagctggggatacagtttggtatgatgctatcgaagacgagattcatacacatcaaccagaaatcattgtggttaatggtggagacaatcaaagattagatttaggttcactcatcatgggaaaagaagacatctatgaagttcacaaggctgctcctcatgctaagattatatctgttcatatggaagctgttaaccattggacactatctagagaagaattaaaaaactttagtaaagaaaaaggattctcaagtaatattttagtgccagaagatggcgagtcttacacattttaatatgaacaccgacaaataaatagaagaagctcataattataaaaactaatcatgagcttcttctaataatgaatattttaaattttaaatatatcgaaaatcctaaatatacggaataacaaaaatggaatgttccaatgatgacaaaaaaacttgaaaagcaacaaagatgtgtcgttaggaggtagaattcatggtaatgacaaaaaaagatacaaatatatcaacacagcagcctctttggttacaaggttatattgattcaccagaaaaacaaaaccaactttataaaaaaacattaaaaatcttgattttttcacaaatatttgggggagcaggacttggagctgggataacagttggggcgcttcttgcacaagatatgataggatcggaaaatgtagcaggaattccaactgccctctttacttttggatctgccgtagctgccctgcttataggagcatcctcacaacgttttggtcgcagagctggacttgcaggtggtttccttataggcggattaggtgctataggtgtgataatcgcggctttaattaacagcgttgccctattatttgtttctcttcttatttatggagcaggtatggcttctaatcttcaagttcggtatgctgggacagaccttgcaaatgagaaacaacgggcaactgctgcaagtatggccttagtttctactactttaggagctgtagtaggtcctaacttagttaatacaatgggggaatttgcagattcaattggtgttcccaatttagctggtccgtttattatgtcaggagcagcttttataattgctggaattattctcttaatttttcttcgtccagatccgctgtttgtatcaacagctattgcgaatgctgagaaaaaagacgataaagtacaaataggaggaagtctaaaaaatcctgctatagacaaaaaaggaataatggtaggagctgtcattatgattttagctcaactaatcatgacagctattatgacaatgacaccggttcacatgggtcatcacggtcatggtttaagcgaagtgggattagttataggactccatattgcagcgatgtatcttccttcaccattgactggtttattagtagataagtttggtcgcacaactatggctattgcttcaggtgccacacttcttgccgctgggttggtggcagctattgcaccggcagactcattatcattgctaatcctagcactagtattactaggggtaggttggaactttggtttactaacgggaactgcccttattatagattcaacacatccatctctacgtgcaaaaacacagggaacattcgatgttttattagcactatcaggagcagcaggtggagccttgtcaggaatggttgttgcacattctagttatacaatactatcaatttctggagccgttttatcattgttactcattccagtagttatttggtattttagaaggattcaggaaaaagcataagcttatataactgtctttgaagaacctaagtagacattactttaccggaacctcctttttctatttattatagtaaggagttgacatggcattagtggcatgtgtataactacacaattatttgggattcagagagcatgtaatgaacggaagagataattatttatcacttttattattgtacggtgttcttgtggcattaagttcagtcaattttggtctaactgttttctttttgttttcatcacctctccatattattaacaaacacgaaaaggattttaatgaaaataaaatgattagcgtatgtatctctaattttcaaaatgaatgaatagtcctttttaagatttacacacttattctccaaggaaaaatgactcaatttttcgattttttatgtaaatcaaaaaagaatcatgttagagtaggtgtgctgaaaataattcaaaaaattattttgcgatatgattaaagtaatattgccagagagtttcaattggacaaaattgtaagtgtttaatacactggggctgcaatcaaatatgcacctggaatcaattgctaaacgggggagtttatatgaacaacaagaaaaatatctttgatattgttatgtacattattttcggtgtgttaagtctttttctagttgcaaaaactgattatggcactggagttttagtgtttgttgcaattttatacctcgctgttattgcttataaaattaagcaagtatttagtaattcagattcttaaggtgtaacacaaggaggatttcaattgagaaagaaaagagttattacttgtgttatggctgcatcattgactttaggctcacttttacctgcaggttacgcttctgcaaaggaggactctaagacaaccccttcttacgaagaactagctctacattacaaaatgaaaagtgaaaagatttcatcgaacgggaaattagttgaaattgagtatgtgagtggaaatgaaactcacaaagttcagatgaacggaaataatcatactgtaaaagtcgatggcatagaacaaaaaggtttaaactttgagtatgatgaaaatgttgctaaaagaacaaattatgaaaacaataatttgaaatcaaatgaattcacaacacaggctgcaaaacctaaaaagggataccattatgtggggactttatctgggcatacaaaagcagctaaaaatgcgttatcagttacaatgtcattagtcggtattgtccctggcttgggatgggggagtaaggctgccactattttattctcttattgggcaaaagaacaaatccctgatgcgtattataaatatgatttatacgaaaaaggagcaatgactgatagttggtatcagtatgctacagttcaattttttgaagataaagctcataaaaagaaaatgggcaaaccttggacaagtactcctgcaaaagtagatttacctaatagctaattttaaaatcactttgtctttataaaggacaaagtgattttttgttatacagaagtaaaatccctcgtctgaggaatcttggaaaaaacttggttcaattttgatataacatgtttttttcttgctaatttagtttttctatgtatcgctacacattctaaataataagatattagccggacggttgatgccaagctcaaaagtttatatggaagtcaaagcataaaaaagggtgttacaacgtgtagtcttctttttattttgccaacgtaacaagtgtgaaagtaatgatttgtaggatcagttaagaaaggtttaagattagatattgaaaaattttatatattttcaataaaatactggtactataataaatgtatacagattgtatggagatgtaattaattaaaaaggagttttttaattgcgttggagtaaatggttcaatgttttttgtatagtagcattgggatcaatatatggttataaattatttactaaccaagaagtcagtactactcgtttaataatagcttctgtaattgtgttgtggaatattgttggactttttagcaaagaatcagtaaaacaagcacagcaagcaaattaaaagtcataaagttgggaaagaaggatgttacttatgtagtatccttctttattattccttgaaaaatgaaacaaattggagattacagcttatataatcaattgaagtcgttgattattttcatgaacaggagatttaatgctttctgatgaaatattatcgtatgaatgttgcaagaggaaacgttactcaaagattacagggatgtgatgaacactcctctttatcgcactcacctgaccccaaattgttggggaagggcaggtacggaagatagagtattttttcttcgtaacaaatcgaaaaggttggataataaaaaacttataatctaaggcggtatatagttgtgaaaaaggcgttatttcttatattagaccagtatgcagattgggaaggtgtttacttagcatctgcattaaatcaaagagaagattggtcggttcacactgtttctttagaccctattgtaagctcaataggtggttttaaaacatctgtcgattacataatagggttagaacctgcaaattttaatttgctagttatgattggcggggattcctggagtaatgacaataaaaaactattacattttgtaaaaactgcatttcaaaaaaacattccaatagcagcgatatgcggtgcagtggattttttggcgaagaatggtttgctgaataatcatagccatacaggtaattttgtttacttatggaaagattacaaacaatataaaccgattagcagttttgtagagaaacaagcagtaagagataaaaatttggttactgctaatggaactgcccctattgaatttactaatttaattttagagatgattgattttgatactcctgagaacatagagaaaatgatgtatatgaatcgttatggtttttatcatttttgtgataaatatggaaatccatttgttgattaatttgctggaaatgattttcccgaatagggggctttgcgattgagttgaatttcctaataaagcaaagaaagatgatttgaggtcaagtttaacaaataatgccatcaatattaatttgcagttatttccgattcctgatataataaagaagaattatttttgttcggtgtaaaggatagtatgaagattgacttttcgtcttgatgatactttgggcaaggatagtatatactgtgtggttacacactaggaggcaacaaaaatggaacaaggtacagttaaatggtttaatgcagaaaaaggttttggctttatcgaacgcgaaaatggagacgatgtattcgtacacttttctgcaatccaaagtgacggattcaaatctttagacgaaggtcaaaaagtatcgtttgacgttgagcaaggtgctcgtggagctcaagctgctaacgttcaaaaagcttaatcttcaatcgtttatacaaacaggctctttatatagggcctgtttttttatgtctatatcatactcaataaaaaaccctactcaacgttcgagtagggagatgctacaaggtaatagaaaaagatttaaaacttcaaaggtttgtttacagtataacatactggattgacaatatgcggaatgtatataaattatttaatgttttgttcaaatatagataactgactctttttttcactaacctgttcgttcatttaagtaagattagatgaattataaaaatggtttcatctaaatgttatcaactcgcatatctcttttatgagaagaagataaacaattattattcaatgttgcagtggatataagaaattcttaaaaataatgaggagatcgattgtttttttctcctggaaataatcacttagagatacctaaaacaatgaaagccctacctctcttccatccttacggctccttgtccgtgccagtgtgaatcaggatactaaaaaaagtgactattttattgagttttttggtaaaacttcaatcttcgcagaagaaatgtaaataataaaaatggattagaatgtaggaataacaaaagaggtcgttaatgttctaaacataagttggagaagatttgcttttcatcataatattccgaaatatcttttgggatgtatctaaccaaaactttttatttgtttttcagtgattcctttaattacttccagttcactaatcaaaaattcatatgcattatccagcatttttttttcgcttgcattaagtgctttttctttcttcatacgcattaaatcacgtacaacttcagcaccttcttgtatttcacctgtttttattttgtccgtgtttattttgtacctttgcttccatggcagtaacctatcggattctccatgctgaaaaatgtgcataatgtgttttaatgcaagtatatcggtaactggtcgtatattcgaactcaatattttactcgttggaatcataactgtcatattactgattgacattcttatgacataatactgttgtttttcctctaagaattctttttcttctatggcttcaattatacctgctccgtgcattggataaacaatgttatcgccaatttgaaacatatcatccacctccatatatggtatccttcttaagattaccatatatggaggtgtaatatcaaaattttaataataacatgatcgaatttttgatgtcaataacttttttgaaaaaacagatcaagcaaaaacaatagggaacgtgtcggatttccaatcaggaaaaggtcaattgatccgtgtgagcagtttttcattggctcaatgacattacagaaatgatttgagtagataagaaagaacgatattcgtgaaatgtcagctaaaaatatttaaagcacatgattaagttctaatttctttaccgatttgatatggataacggccgacttacttaatgatgcattttcacttatcttgcaagcagaaaaaggtttgttgataaacatttagccaccaaattggcattattatcagggaaattgacaaccttcaaatgggtattgaggcgagaagaaaaataaagaaaggagagattataaatgaagaccagaacataaagaagtaaaggggaaagaacaaggttaattgaaaagcaaactatataaaatagtttgcttttttttgttatgacttcacttctttttctttctctttaatgactaataaaacaccgctcagaattaaaaacgaacctatccaaaatgtcccgcctatttgttctccaagcagaatccatccgagtaaggttccaaccagaggctgaaaaaagaaaaagaggcctccacttgaggcatttaataattgtaagccgtggttccacaataaaaatgcacaagctgttgaaacaattcccaaatacaaaaggccacctagaattttagggtcaagcagtagtggcgtaaaaatcgtgctaggggagtaccattaacagggactccatttattaatagaataaactttatgaattcatttttttgtatgataatggcgtcatattcatcgcttgttgaaatttacttatgaaataactggtactgttaaatccaacttgataagacacttctgtcacattggattcagggtgttgcagtaataataagcttttttgaattctataatccattacataacgtaatggcgtcttattcagcattcgtttaaaataacggcagcattcagaacggctcagttggccagcttttgcaatgtcctctaatgtgattttttcaacataatggagatggatccagtttaacatttgtttcattcgatgactttttatcatttcagattgatcgtactctaattgaaaaccattaacgaccaggtttttccacattaacgttaattgcatcgtaatgtcaatctcatagagcgatgtcttttgttgaatcaattgatttatttttttaacagcatctagaatattttttgcccactgttgatttccagccaaaaataaatagggcaaattggttgaaaacatatagggctgaacatagcttgaatacagttcctgagataaaacgaaatggggtgacacattcaagcaaatatacgtacaatccgagccttccttttcttcggccatgtgcaggtagccgctattgataaataatccatccccttcgtgaacctctattttttcttcatttatttgaaagagagctatcccttttagtatcaaaacaaattggatttcatcatgccaatgaagcggaatatagccatttatattttgattgatcgttgtcttgtagcaggcaactggcaattctaccgttcggtgctctgttaattcttttaaattttgatcgatcacaaaattcttcattctgacttcacacctcaatatatttatattttttcattcaatttgagtattttttatcatgttttgcatttattataacactattattatatttattagtgaggagtcatgtatgaatacttccaatagaagaatgggattgttctatgttatcacaggggcgacatgttgggggattggaggcacagtagccaaaaaactttttcaagaatatcaaattgatgtcaattggcttgtaacgacacgcttgcttacggctggaatgttacttttaatgctgcaactgttcagaaaggatcgttcccaggttattgaggtgtggaaacacaaagcgtcggctggccagcttctaatttttggcctattgggaatgctagctgtgcagtacacatatatggcatccattcaacatgggaatgctgccgttgctacgttattgcaatatttatccccagtaatcgtcattatctacacgctgttgcgaaaacaaacggttcttaccaaacaagatatcataactgttgtacttgctttagtgggttgcttttttttgttaacaaatggttcaatgtctcaactttcagtgccggcagctgcagtagtatggggagttttatcaggattcgcggcagctttttatactttgtatgccgttggtttattaaataaatttgattctcttgtcgttgtaggttgggctatgattattggcggttttgcattgggttttatccatccgccatggcaactggattttcaacgattaactgctgaggcgtatgcatatatcttattcgtgatattatttggaacaatgattgcgttctggttcttcataaaaagcttggaaagcctctctccaaaagaaacaagcctactaggcagtctagagcctctatcagctgttgtaacaactgtcgtttggttaaaagcgccatttggttcttttcaatggattggtgctatttgtattatagggataactttaatattggctttacataaagagccttctatggagagtgaaaaatcgatattaaagattaggaatcatgcaaatcgggatatataggggctttttttgcttacatgaccggtccggcaatgaaaaacactggtggagtttgagccctctcggcagtatcaaaaataccaagggttttgacgccctaggtattttttcttcaagaaccttcaatttttcttctctgattgaaaaacgtattacttttttgtgattggtatccaaatttcacttttaaaagatggtgatgttacatccttatgctcgttccacaatatttctggaccttctatttgttcgtaatttgacgatggaaaccattcggaataaatgcgtccccatacttcttgcagtgtatccggaaatggcccgattgattcgaatacagcccatgttgaggcaggaacttcaagccgtgagaagttatctggacaccgtttcgttgtggctgcgccaatatagtgatcgagctctccgttttcctctgtccgaccttcagaaaaattcgtggatgcactaatgaggcctgatggtgctacattagatagctcttttagtttatttattgctttttcatctaaactttcccacatagatgcaatttccggattaattcctttgaaaataataggaactctttttttaatgccaacgatgcgaaatgcctctttttcttcaatacggtagttcatttcatttcctcctttaattgttagctggaaggtcattcgtggataagctttaagggaatggccattaaatctggcttttgatgggtttatgccatgtaaattttggaatgcccgtgcaaaagaatctggtgagttataaccgtactttattgcaatatcaatcacttttacattgctgtctttcagttcaaaagctgcaagagtaagacgtctgcgacgaatatattccgataatgaaatacctgcaaggaaggaaaacatccttttaaaatgatattcagagcagaaagcaagctttgctgcctcttgaaaatcaatatcattagtgaggttttcttcaatatactttaacgccctattcatacttttaagcaaatccatttatttggcctcctttaaccaaagaataacaggagtgaaatgtatttatccgacattctgtgcacagttttgcaggatgacttatatgaaataaagtaagtgattcacttgtatttgtacaggttttattgaagcatgctgttcataaaaaggcatcaataaaagaaagttataattgtcttataaacggcacattcatataattgagtgaaaaaggatgcgtatcatgcctatcaattcttttgaaaattatccgatgagctggaagccatcgattgataaagctgaaaagcctatttataaagcacttgcagggcaattggaacaggatattttaaacggagttttattacctggaacaaaacttcctccacagcgagaattggccgattatctagatttaaatgtgagtacgatttcaaaagcatttaaagtgtgtgagttaaaagggctgctgagtgcgactgtagggagcggcacatttgtatcgtatgatgcgttgtcgaatgcgtatttacttgaggatactaagccgacacatttaattgaaatgggagcaatacttccagatcacgcttcatatgagcccttgttataccaactgaaaaacatggttcatgaggaggattatgaaaaatggtttagctatggccgggcaggtgaaagcctttggcaaaaagatgcagctgtaaagctcatccaaagaggcggatttgaaacatccgttgatcacattttatttgcaaatggagggcaaaatgcgattgcagcgacattggcgagtctttgtaagcctggagatcgcatcggagttgaccatcatacgtaccctggattaaaaactgttgcatcattgcttagtgtgcaaatcgtaccgataaaatcagaaaacgatgaaatgagtccggagtcacttgaatatgcgtgtaaaaacgaaaatattaaaggtttgtatttaatcccggattatcataatccgacgacttcctttatgtctgttgagaatcgaagaatggttgcagacattgtaaagaaatataatctgtttgttattgaggatgcatcgtaccatcttctcaacaaaaatccgcttccggcactcgcctcattcgcaccgcaacaggttattcatattgcaagtttatcaaaatcgttagcgccaggcctgcgtttggcttatgtagcagtgccgagacaatataaggagccaatatcaaaggcgctttataatttaaatataactgtttccccgctattagctgaacttactgctcgcacgattgtatcaaatcaatttgaagtcttaattgagagtcatcgtgaacaaaccattcgcagaaatcaactcgtaaaccgatatgttgcgggatatacatgtttaggtgttgaaacaggcatttttcgttggttgttgttaccgggtaaaatgtctggtgccgaatttgaagaattggctgctcgacttggcgtgcaagtgtatgcggctgaacgctttgtagtgggaaatagttgtcctgaaagggctgtaagggtttctgtctgtgcaccaaaaacacttgaagagcttgaacaaggattaatgatcctgagacgtttgctagacgatcttacctaatattgtttgccatacaattatgacattgtatggcttttttgtgcgtgttatgatgatccacatctagagggaggtttatacaaaattggcttttagaaaggaaggtcagatgatgttagacaaggacagcgtaaaagcaatagatgttcaaactgcttcattacagagctacatcagttcaccagaaaaacaaaaatcgttatacaagcgtacactattcgttgtgagtatctcacaaatttttggcggtgcggggctggcggcaggagtgactgtcggtgcgcttattgcacagcaaatgcttggcactgatgcgtttgctggtttgccttctgctttatttactttagggtcagcaggatctgcattaattgttggaagactttctcaacgttatggccgtcgaacaggtctttcagctggctttatgattggcggacttggagcaataggcgttattatggcagcaatcataaatagtattttcttgttatttatttcgttgcttatttacggtgcaggtacagccactaatttacaggcccgttatgcaggtacagacttagcaaatcataagcagcgagcgactgctgttagtataaccatggtttttactacatttggcgcagtggcaggtccaagcttagtgaatgtgatgggggatttcgctctttctattggtgttccatcacttgctggccctttcattttagccgcagcagcatatatgttagcaggtgtggtccttttcattatgcttcgtccagatccattagttatagcaagaacaatagaagcggcaaatgaagagcctggtgataaaggacatttggcggcaactgagcatacagaaaacaaaaaagggataatcgttggggcaacggttatggttcttacccaaatagtaatggtagctattatgacaatgacaccggttcatatgagacatcatgggcatgacttgggtgcagtcggtcttgttattggttttcatataggtgctatgtatctcccttcacttgttacaggtgttcttgtagataggttgggacgtaccgcaatggctatttcctctggaacaacgttgcttttggcaggtgtaatagcagcatttgctccgggagaatctatgattcttctcgtcattgctctttctttactgggattagggtggaattttggtttgataagcgggactgcccttattgtagattcaactgatactgccacacgagctaaaacgcaggggacagtggatgttctgattgcgttgtcaggagctgctggcggagcattatctggaatgattgtggcaggttcaagttacctcgcattatcacttattggagggattttgtccttattactcattccggtggtggtatggtctaggggccgctaaagggtaggattgtttaatttacattaatttgttatattgttagataaagtatattgcagcatctaatattctaacgaactatagttgctccattaaatctattataaagatttgaccaggattccttatagctgtgtcactcactgcatattctttaattgaatcacataaaatggttatcggatttgaaaaaggcaggattactcgctttaggtaaaggagtcataacgttgttaaaaaggttttctcttgttattgttacactaatgatgtctatcgttgttgttttagcggctgctaaagagtcgcctggagatcatgtcatctcatttgatgaacctattatcttgatgatctcaattggaatcgttgtatttttattgatccctccattagtcatgtccttttttggcaatttggttgtaagaataatatctggtgtataccaatgttttatcgttttcacttttctggggctcattccaattggatttcttattcccaatggctttttgacaattctagtttctattgcaggaactttagtcagtatagctagtgttgccgtaaccttatgcattggcaagaataaaaaagatatataatcatcgaattgttattttttcagattgtcagtgaaataattatacaaaaagagaaggcttgtgggccttctttttttgttgttgcatcatccccactttgagcttaatctattgaataataagagaaggaacctatagaagaataaaataaataccgagatgtcaaaaataaaactggacttcattattgtgaattcacgtaaatgtaaaaagattggaaagaggggaattccttcatgacaaatagcagaacaaatccgaaggttgatgaatttttaagtaaagcgaaaaagtggaaggaagaatttgagaagttgagaaccatcattcttgactgtgagctgactgaagattttaagtggatgcatccttgttacacatatcataataaaaatattgttttaatacatgggtttaaagaatattgcgcgcttctgttccacaaaggcgtcttattacaggatacagatggaattctcattcaacaaacggagaatgtacaggcggcgcgccagattcggtttacaaatgttcaggaaataaatgagctagaaaacattttgaaagcctatattcacgaagccattgaagttgaaaaagccggtttgaaagtggatgttaacaaaaatattgaattgaacattcctgaagaacttcaaaataaattcgatgaaatccctgcattgaaaattgcttttgaagctttgaccccgggacggcaaagagcgtacactctttatttttctcaagccaaacaatccaaaacccgagaatcgagagtcgaaaaatatgtgcaaaaaattctcgatggaaagggattaaaggattaggcacgccaaggttcaggctaaaggaatagcatcatagcgtaataagatcatttctatagaagaaaaacaagcatagtaagatgcttgttttttcttaggacaacattcacttactgctgaaatgcttctaacattgtatgccactagacagcgttataaaatattaatgcaacacctagaaatctatccaatgaaatagctcaatggtatggctcattacatttagaatgcctaggagaactaatagaaccggaagatttttagcaagttactacactccaaactttgtttttgtattaatataccttattaaccattgtttttagtcaggtgcagacaaacgaatactgattaatgaatcatcatgatatcaatgagccgcttgattttttcatcgtcgcctgtatcaacgtacactgtttttctgttttttatgatactctcagtcacttcccgcatgacgcctttttctatatcatcagcggaatcccagcgtaaaggcacattatatacatgaattgtgccatccccattgccatgataagtgactgatccatccactaaacgagaacctgccaactgggtcacattttctggatagctggcacttgtatcatcattaggattaattggctcgccagccgcaatatgtcgaacatttaattcatctatctcttgattaggtccaagttgaagccaaactctggcatattcaattttttccgaagagtatgctgccaatacattgtcttctttgcttttctcttctgctgaagaggtatcatttgcagcttttgttgcggattcttctgattctgttattggctccgcttcatccttgcgtattttggtgctctcttcaggctcagtgtgtttttcgtcagtttgcacagcagaagcttgatttgaaggttgttgtgcttctccatccttactgtccgtacatccagcaagcaaaatcataagcagcagggcagtattgcaataacatatctttctgcgtttcttcattttttcattcctctctattaattcaggtcagcttcatatataagtttatgtatctaaatattaccatggaatagataggatgatattgaaaactgtttaagaagaggaaacgatcttgaatagcatcgcgaaaacctaagaatcttaagaagttttgcccctttttcttcaggtattgaatgtaaagtgggatataaatgcaaacaaaaacgaaatgccttatccacctcgtgtcatggcagaaaaagtgggggatttattagagcggatttgataatggcggcaggtaaatgggtgttgacttatatgtctaagcgggagactcaagtctgctcgatcgcatacaaaataccaagggccagcaacccttggtatttttataccttcatgcatttttgaagtttatgcttaaaggtctgccttactttgcaaatcgccgagctgctgcaacgcacatgataacggcgatattcactgctacgagtgcccagcccactttctcgtgcagaatcactgaggcaagcagcagtccaaaaaaaggctggagaagctggagctgcccaaccgctgcaattcccccttgggcaagacctcgataccagaacacgaagccaatcagcatgctgaataaggatacatatgcaagactgagcagtgcgggaacgccgatcgccgaccatgagtccggcgtaaaaaagaacgacaatggcagcataagaggaagcgacagaacgagtgcccatgagatcacctgccaattccccagacgccgtgaaagtttggccccttctgcataaccaagaccgcatacgacaatagaagccagcatgtacgcgtcgccaagcggggatgaacctcccccctgaatgagggcgaaacctgctactaacaagctgccggcagctgagaaaatccagaagacggggcgagggcgttcacccccgcgcagtacgccgaagactgccgttgcgagtggaagaagtccaatgaagacaatggcgtgtgcggatgtgacatgctgaagcgctaaagctgtcagcaacgggaaaccaatcactacgccgaacgctaccactaacaatgaaatgagatctcttttggcaggatgctgctgccggaagatgagaaggagacctcccgccagtacaccagctatcgcagcacggcaaactgtgagaaataacggatcgaagtctgacacagccaaacgggtcgcaggcagcgagccgctgaaaatgagtacgcctataaaaccatttatccagccatttgttgttttgttcattataatcactccacatatctttcttgttcattgtctgtattttcttaacaaaaccagcagctaaggattacaatgactataaactggaattggccttttataaacagccagttttcataaaaaaatgcataccagttaggagaacaacgcgcaaatggatatcacgccttttttgaatagaactctggatattccgctttatcagcagctttatcggtattttaaagaaaatatgcatcggggccgtattcaaaaaggaatgaagcttccttcaaaaagactcctggcgaatcagctttccatcagccaaacgactgtagaacgtgcctatgaacagctcgctgctgaaggttatattgtgagcaagccaagaagcgggtggtttgctgattatcatgattctgattttgcttatgatagaatgccaagcacaacacccattcaacaagaagcagaagaaaataaacaatggattgattttcattatgggaatgtagattcttcttacttccctttttccgcatggcgaaaaagcatggtcaatagcttagaccaatatggacacgagctttatcggccgggacatgttttaggagagtttgagctgagaacactcattgcagagtacctgtatcaatctcggggggttcattgcggccctgaacaagtgattataggtgccgggaaccctattctgctgcaaatcttgtgccaagtttttgagccgaatatttctatagggtatgaggatcctggttatccaagagcacgcaagatttttgaagccaaccgcatgaatattgttcctataccagtcgatgatgagggaatctgtatacagaagatcaaagaacagcagccaaaccttgtatatgtcacaccttcccatcaatttacgctgggaaccataatgacaataaacagaagaattcagctgctcaaatgggcggccgaaaatcaatcctttatcatagaggatgattatgacggggaatttaggtacacaggacagccggttccttctctgcaagggcttgatcagcataaccgtgtcatttatatgggcactttttctaagtctcttttgccctcgctgcgtatcagctatatgattcttccttcgcctcttttaaaaaagggtcatgaaatcacgtccttatataagcagacagtgtcctgccacagtcagctaaccctagctgaatttataaaaaatggagagtggcaaaaacacatcaacagaatgagaaaactttaccgcaaaaaaagagccattgtattagaggcagtgcaaagggaattaggagagcatgtcagaatccgcggagaaaactctgggcttcgtatcttacttgacgtttatttgccatttggtgaaaaagagttaattgagaaggcgaaaaaacatggagtaaaaatttatcctgtttctctttcttatcaacatcatcctcctacaaaaacggtctcgctcgggtttgcaggggtttctgaatccgacataagagaaggcataaaaaaactgaaggctgcctggaagatatgagggagctttcagtttagcaaaacggccaagtgacgactaagtgttgagagctgttcaatattttttaagtatatgatgagtgcctgcagtccaggccacgatacgtctgtttagcgaaaaacagaattttttatttgctcctcacagtgctaaaataaacaaaatagacaattgaaaaaatagaggtgtaagaatgaagttagatgagtttacaattggccaggtcttcaaaacgaaatcattaaaagtatcaaaagatgatattatgcggtttgcgggtgaatttgaccctcagtatatgcatgtagatgaagaaaaagcgagtaaaggcagatttaatggaattatcgcttccggcatacaaacactggccatatcttttaaactttggattgaagaaggtttctatggagacgatattatagccggaacagagatgaatcatatgacattcataaaacccgtatatccggatgatgaattgtttacaattgttgaggttcttgataagcagccaaagagaaatgaattgggaatactcacagtattgctatctacttataatcaaaaagaagtaaaagtgtttgaaggtgagttatctgtattgatcaaacgataactcagaaagcccgcttttcgcgggctcgattgaagcagatgggtgaaagatgttagcgggtttcctttgaaaaataagaggttaaaacatcataaacaataggcaaagaagtaaatccctcatcttctagaaaatgacctccgtgctgaacttcatataacgcagcatcaatttgttgtgccagatccttgctgaatgaaaaaggcacaatttggtcgtccttagaagcaatgacagcacggtgcttcgcggactcgatgattttttgatgatcaaacgatccctgtgtaaattcatctaacatctgtaaagtgggcaatgatttggcaaagccggaaacaagtatgattccgccaagctgttttcgtaattgaagatgttccaaaaatctcaaaatggcggggcaacctaagctgtgcgcaaccaaatacgtattttcatgtaaagtgtgctgatataaagagagtgtatccagccaatcctcaagtcttggctggagcggattaggcatgtttaaaatgtctgcttggaccccatctgcgagcagacgttttttcagccaagggaaccaatgatttgttgaggaggctctgtagccatgaatgatatagacttgttttgtcattatttcctcctaagaaatattttcattcagtataaaattcctctcattgggaaacaagtacgcacttttttgtaagtagctttacatatgaggccctccttgtgccattccccacttacacatctcatctatgaggggatacaaagatcgccctctgtcagataacgaatactctactttcagtggggtgtgagaaacctcagaccgatgaataaggccgtcagtttgcaattccttaagctgtgcgcttaacattttatgggtgatgaagggcatagcccttttcagctcgccgtatctcatcgttttttcacaccctaactcatagagaattctcattttccatttgccccctataagagataaggtgtattcaaatggggcttgtttactgcggcacaggctattcattgtaatcaaacctccttttttaagtatcatatcagaataaattaggattttcggtgttgaagtttgagggcgattcacgatctgaagtgaaaggggccgcttgctcaacaggcggcacggtacatgaatgttctaagtcaaagagggttaccttactgttagttactttatttaaaaaaacgcatgtttttagctgaaaatatctattatggtatatttaaatataaagaaatatttgagaaatgaggaatggtatgaatacacccaaaaaacataagaaatttaaagcgaaaatgattctccaaatcatcatggttatcattggaggaatcatagcggcatatggactagaaacagtgctcattccaaacagtgtatctgatggaggggtgacgggtcttagcatcgttggttcacagctattcaacttgccgctggggattttgattgctgtgatcaacattccatttgtctggttaggatataagcaaattgggaaaagctttgcattattatcaattatcggaatcgtatcgcttgccgcggggacaagctttttccaccacacacccgctatcatagaaggagataccctgttaattaccgttgtcggcgggattatccttggattcggaatggggctggcgctgcgtaatggcggcgcattagatggaattgacatgcttgctgtgctgctatcccgaaaactgccattcggaacgagcgatctcattctattcttaaacctatttgtgtttatttttgtttccacagtatttggcttacaaggggcattgctttcagtcattgcttactacattgcatccaaagtgattcatgttgtggaggaaggcttaagcggctctaaaacctttcaaattattacaacccaacctgaattaatggtagagacaatacgtgatcaattaggccgaagcgccacatataaagaagcttacgggggtttttcccacgagaaatttaaagaaatcacatgtgtcatcaaccgtttagaagaaaccaaactaaaggaaattattaatgatattgataaaactgcctttgttaccgtgtatgatgtagctgaagtgaagggcagcaattttagaaatcttaatcatcactaaaaaatagaatgacctttttaaccgtaactgacatgccgcgggtaatttaatcaaaaacacttttttgaggcttgtgggtgaataaccggtgaaggtctgaatcacagaaataccaagggcgtcaaaacccttggtattttttctggttattagattttatcttcagctttacgtgctgcttcgagcttatcaatcctgtctttatatttttctccccagtccttcatgtgcaggataacaggttctaatgttcttccaaactcagttaaagagtattcgacttttggagggacctgtttataaacctcgcggtgaatcacgccatcccgttccaattctcttaattgtagcgtgagcatacgctgggtaatttttgggtatagttttcgaaactcattaaacctctttttaccgtcaatgagatgataaagaagaatgcctttccacttacctccgatgatatctaatgttgtctccaccggacatccttcaaagtcatcagaagaataatcaatgccgagtttacgatttctcaagctgttcactcctaatagtatactttttgatactatatacattcaatgtgcgtactttttatattttaatatacatcatataatgatgtcacatctaaggaatgaaaggaatggatcatatgaaaacactcgtactcgttgtacatccgaatatagaatcctctcgtatcaataaaaagtggaaagaagccgttttaagtgaaccagatgtaactgtccatgatctttatgaaaaatatcgcgatcaaccaattgatgtggaatttgaacaacagcagctcctggcccatgaccgtatcgtttttcagtttccattatactggtacagcagcccaccgcttttaaaacagtggtttgatgaagtgtttacgtttggctgggctcatggtcccggcggaaataaattgaaggggaaagagtgggtaactgccatgtccatcggttcacctgaacactcttatcaagccggcggatataacttgttttcgataagcgagctgacaaaaccgttccaagcatctgcccatttagtaggcatgacctatctgccttcctttgccgaatatcgcgccaatacaatcagtgaccaagaaattgccgaaagtgcgaatcggtatgtaaagcatattacaaatatagaattaaacccgaaggttcgcctgcaaaggtatttgaaacagctggagagtgtcgatttaacataaagattgatttttgaaaatcctgtactcaccaagcaggattttttcttgttcagcagagggattttaacatatagcaaaaaaagaagaagccaccaaaaataagctatttgcttggtcctgactgcttatttttggtgaaatacttatttctctgtgatgaaataaagcaaagcgatgaccggaaaagcgattccaatccataatgctgtactccatccgcctgaggcatatgcccatcctccaattgatgaccctatcgcaccgcctagaaagaagatcgccatgaataatccgtttaatcgactgcgaatttcaggcgccaacgaaaaaatagcacgttgactgagcacaaggtttgcagatacacccatatctaacagaatagcagcggccactagaactgttataccgacgggggagctgctctgaatcatgagcggcagtaataaagagacaacgacaacaccgagagcgattccagtggcaagcctggttaagcctcgatcagccaggcggccgcctattggtgcagtgactgcacccgcaatgcccaccaatgcgtagagtgctattgccttctgagaaaaatgaaaatcaggaccggacaataataaaggaacagttgtccagaacaagctgaaagctccaaatacaaacgcatgatagatggcacggcggcgtaagactggagtcgtgcgcagcagcttccacattgaaccgagtaaggcagtatagtttgtatttgctgttggttttctggcaggaagcacttttgataatacgatggccaggataacacttaccacggcggacaaagcgaatattgcattccacccccagatatcagcgactagactagatatcggacgggaaagcataataccgagtaataagccgctcatgacattgccaacaacccggccgcgtgcagcgtctgatgcaaggtatgatgcaaatggaacaagcacttgggctgcgattgatcccaatccgacgaaaaacgcagctgctaaaaacagtgttccatgcttcacaaatgctgttagtgtcaaagccgctgcgcttagaaggagcgatacaacaataagttttttgttttcgataatatctcctaaagggacaaggaatagtaagccggcaacgtatccgatttgggtgagtgtgacaatcaatccagcaccgcttggagaaagtccaattgccttactaattaatccgaccaagggttgtgcatagtaaagattagcaacaatgataccgcatgcagttgcgagaagaagggttaaactgggtgaaatcctctgacctgcttgtttgtttccattagccatatgaatgaactcctttttaagtggttttttgagtgtaatcatgacttctcacaagtgattttataaactgaacgttcagtttcgtcgattaataaaaataatatactaaacgttcagttttgtaaatggatttctgttttctttttttattcaatttaagtatactgaacgtatagtttatattgcgggaaggaatgatttatgtgcagagtaaacgagggcggccgcgtgatgaaggaacgcataaggcgattctctctgcagcctatgacctattgctggaaaaaggcttcgatgcggtgacagtcgataaaattgccgagcgtgcgaaagtgagtaaagcaacgatttataaatggtggtctaacaaggctgccgttatcatggacagctttctttcgaccgcgacggacaggctgcctgtgcctgatacagggtcgtcagtacaagatatagtaacccacgccacgaatttagctaggtttttgacaagccgggaaggaaccgttattaaggaattaataggtgcagggcagttggatgaaaaattggcagaagaatatcgcacgcgatttttccagcctcgccgcctccaagcgaaaggccttctagaaaagggaattcagaaaggtgaattgagagagaatcttgatattgaagtaagcatagatctcatttacggaccaattttctatcgtctgcttataacaggggatgaggtgaatgattcctatgtgcgtgatttggtgatgaatgcgtttaagggagttcaagctacctctgctacagagagtatgtagctgataagaactgcaaaagctgcggattatatgacaaattggttccatcgtacagtgaaatataagatttttgttgctgagcggaatcatcgagggaaaagttctcttatcggatgtcgaaaaagaagtcattcaatcgtgaatacataacatcatattattacattccttttcatcgattggaacaagggttctatacttcaatggaataccgcaaagttggagtatttaaacaacaggggaaaatcgatggccattatgtaggtgtcatggcaatggaaaaaatacttgcaatgtaaacaggcctctaaagagacctgttttttaatatccagatgattgtctagtttcagcttgggctctatgaccactcccataactgaaatagtctaatatttataccagaagggattgtttatataaataaaagtttatataatgacgggggcgctaaggaaacgcggggagcgactcaggttttcgtttcaaagttttgatccttaagatatacggagcgctacatatggaaacgtaaaggggaatgtataatcatttggcgtgtatataacgatttgcttatatattgatttgggaaggaggagctcatatgacgattgatgttgcggcgatgactcgttgtttgaaaacacttagtgatcaaactaggcttatcatgatgagattatttcttgaacaagaatattgtgtctgtcaattggttgatatgttcgaaatgagccagcccgccataagccagcatttgcggaaattaaaaaacgcaggttttgtgaatgaggacagaagaggccaatggcgttattattcaataaatggttcctgtcctgagtttgatacattgcaattgatcttacatcaaattgatcaagaggatgaattgttaaaccatatcaaacaaaagaaaactcaagcgtgttgccagtaaggaggcattagattgacatcaatgattttggcagtattcatctttttattaactctagtattggtcatatggcagccgaaaaatttatctatagggtggtcagcctgtggaggcgcagttttagctctaatagcaggtgttgtcaattttcatgatgtgttaactgtgacagggattgtttggaatgcgaccttggcttttgtggccatcatactgatatcgttaattcttgataatatcggtttctttgaatgggcagcgcttcatatggctaaggctgcaaaaggatacggtgtgcggatgttcgtttatgtatctctattaggagctatcgtcgccgcgttatttgcaaatgacggtgcagctcttatattgacaccaatcgtattagcgatggtcagagcattacattttaatgaaaaattagtttttccttttatcattgccagcggatttattgcggataccacttcgcttccttttgtagtaagcaatttggtcaacattgtttcagcggactattttcatattacgtttattgattatgcatccagaatggttgtcccgtacctgttttcgctgctggcgagcatcattgtactttaccttttctttagaaaaagcataccaaaacgctatgatctgactgaggttaaaaaacctgttgaagcaattaaagatcaaaacatgttcagactgtcatggtatatcttagggctgctgttaattggatattttgcaagtgaatttttttctatccctgtatcagtggtagcgggcagcattgcaatcattttcttaatcgctgcgcaaaagagtccggccgtccatacaaagaaagtggtgaaagaggcgccatgggctatcgtattcttttcaattggcatgtacgttgttgtgtatggtgtccgaaatgccggattaacggatgtcctttcagatgtgattcaagccgcagctgatcaaggattgtttgctgggacaattggaatgggctttattgcggcgattctttcttccattatgaataacttgccgactgttatgattgacgcattggccattgccggtacagatacacatgggatgatgagagaagcgcttatttatgcaaatgtgatcggttcagatttagggcctaaaataacaccgattggttccttagcgacattattatggcttcatgttctttcgcacaaaggtatgaagatttcctggggcacgtattttaaaacaggaattatcctcacgatacccactttattgatcacacttgtcggcctgtatatttggctgctgataatccattcttgtttctaaaaggacaaggtcactatatcaaggaaaacaatgcactggtaactcttgccgcagccaaatggctgaagggtgggggagaaaataccttggggctaagtggaatgtgtacagcgcaggaatcgaagctcaaggatgacatcgagtgctgtcaaagcaatgaaagaagcagggattgatatttcaaatcaaacatcggagaaatttgatgatccggcaaaagcacacggaacagaagaagtgtttccaaagggtccgtgatgaaattggtgaccgtttaaaacagtttgctgtaactggggaataaagaatcgatatattcagcgttttcttgggttatataatacaatgtgttgttcaacaggtgtctgcgagctgagtgcagacacctgtttttgtttttatttgtctgagattcgtaacagggaagttatttagctggtgacagaggaaaattgatttgtgaacagaatcatgaaggagacggtgttttaaaggagttgtctgttttgcaggaattaacaaaaaaaaaatacagtagcttaaaaacaatgtttgatgacaaatattgtcccacatttgtctattcaatattagaccaaaccattccgggagctgtttatgcagatgatcaaacctttcctaaatcgttttttataggaactgaatcaggcatttattttattgcgggagaccaagggaatcgggattttcatgatttcattgcaggatattatgaagaacaagtgaaatcatcaaaacgatttaccttgttttcttccagtgatacatgggatagcgtactgaaacccatactgaaagatgacttaaaccaaatgagaagagctgcattttcttatcaaccaaaatctttcaaaaagactttgcaactgccaaaggggcttgtattgaaaagaattgacgaagacatcatttcacatagcacagcgtttaacagcgcgtattatgaggagtattggaattctgtctcacagtttgcttcaaaaggttttggatttgccgtattacatggcaatcacgtagtaagtgagtgtacctctatatttttagggcataatcgagcggaaatggatatctatacacttgaagaatatagaggactggggttagcttattgcgtagcaaataggtttatagcgttttgtatggaaaatgggattgttcctagctgggattgtgatatttgcaacaattcgtccattgcattagcagctaaactagggtttaagacggtaacggaatacactatttactactctggctaaccttaatgaaagaaccttaaaaggagataccaaccgatgttggtatcttttttgttttagagtttttttacccttttagcagaaaaatgggtgatgaaaatcttattcattttatttacttttaggtaggtaaaacataccccgccaactgtaaccactccgcctagcagagagagcagtgtgggtatctcgccgatccagagccaagatatgatcaaggctaaagccggtgtaacataaagtgaaagggttgcttctgaagcaccgacgaatgaagtgacatatgctagtgcgaagtaaggaataaccgtcggcaataatcctaagtaaacgatagacaaagttgcgcttattgaagcgttcatcatctcttcgcctaagcctggcagaaacacaagcataggtattgttccgccccaaatggtgaatgtaacgaatggaataaaaccatatttttttatatagcgggcttgaaaaacgaaataaatactctccgaaaatgctgccagcaggatgaccaagataccgctcattgaatatgtaaagtctcccgccccaaatgcaatcaataatacacccaataaactgatcatagagccaagccatttcgtaaatccaaaatgctctttataaaacaggcgggatagcatggctgagaagatcggtgccgtagtaacgagtaagcttgcaactccggcactaactgttttttcaccgatgttcagcaaaatgtgatagaatgcaaatcctaaaaaccctaaaagaaaaatggcaggaatgtctttcaagtcgggtaggcgcatctgagtcaaaacagcaaaaagcaataatgccatagagccgattaacaaacgaaataaagcaaggtgttctggcgtgtacccttcaagtcctgcgcgaattcccggaaaagcagatgcccataaaccaatcatgagactatgagatatcattatttgaactgttttctttcgcattcctctcactcctctttacaaaaaccaaccagttatttaatgtgtttctatactaataaagatttgatgatatggcttcaaccagttcaatagattttgacccaaccaatttattttaaggagaccgattctatgagctttccagaagaaaaaaagatgaaaaagctccctaagtacagacaaatcgttcattttattaaagagaaaataggaaatggagagtggccgattggaagcaagattccaagccagcgcacgcttgcaaaagattttcaggtaaatcggagcacagtgattacagcgttagaggaattgatggccgatgggctaatagaaggcacaatggggaaaggcacagttgttatcaacaacacatggacactgatggctaagaattctgctcccgattgggatcaatatgtcacctctggcattcagatgccaagccgaaaaatcgttcaagagataaatcaatcagaatcaaatacagaccttatacagctcagtaaaggtgaactttcagctgagatttttcctttggctgttatgaaagagatgatggggaaggtatctcaacacatggaggcattcggatatgaagaaccaaaaggttacttacctttgagggaggcattaagcaactatttaaaaaccattggaatcaacgtctcatcttcttccattctgattgtctcaggagcgttgcaagccttgcagctgatatcaatggggctgttacaaagaggatcaaccgtttatcttgatcagccctcctacctttattcattacacgtatttcaatcagctggtatgaagctgactggacttcctatggataatgaaggacttttgcctgaaaatgttcatttaacaagaggagagcggggaagggctatcttatatacaaatccatgttttcacaatccgactggtattcttatgtctaaaaagcgacgggaagaaatcctagcagtaagtgagaatacacagcttcctattattgaagatgacatttatcgtgagttatggatcgatgaaattccgccatatcctattaaaacaattgataaaaatggacacgtactgtacataggaagtttatcgaaaacattaagcccaggtttgaggattggatggatcgtcggaccggaaccggtgattgaacgtttatctgacattaaaatgcaaacagattacggatccagttcgctatcccagagagtagcggcagagtggtttacttccggccactaccagcagcatgtagaaaaggttaggcagcaattaaaggtgagaagagaattggccttgagtgctttagaaactcatttgaaagaagtggcgacatggaatatcccaaaaggagggttttttgtctggataaaaatattgccttccatatcaatgaaattactttatactaaagccttatcaaaagggattctgatcaatctcggcagtatctatgctcaggaaaaagggaattatattcgcttatcatatgcttatgcatctcttgaagaccttcaaaaggggatttatgagttgggtttaatgattaaagaattggcaagcaggtaacttttatatccttaaatggatgtttcactaaaaaagagatcaagcctaatgatcgcttgatctgataataacaagggttactagaatagaccaaatcatggttcggtcttaaaataatcatgtctctgaacgaaaagtctttccgacttctcttcctaaaccaaagtagtgtctgaaattatagataagcgggctccatttggaagggttgatatggttttcgtccagaatgatactttcctcggcatgaaaatgtagtgcctgcgtctctacaattgcgaatgacgattcatattctggaagccgaatgtgtttcacttcggcttcgatttggatagggcattctttaattcgtgttggtgatactgtttttgattgtaaaggcgttaaccctgctgcctcgtatttttcttttttatatgtaaatccgatctgcttctttaaaggcggtatactcttttttccgctataagatgaaattctttcaacgttttcccataaatccgggccaggcaagtttatgacacactctttgtgtctttccaaattgtcgatggcttttcctcccagtcctactccaaggattatataatgtccaagagcccaagaagaagacataggactaatattagtggttccatcctcattcaatgtggttagaagaaatgtcgaggtaccataatacatgatcttgggtttgatttccttaaatcgacgagtgtcttgttttttgatgtccaacgttttttcctccttgtcacgcttacatttatattgtaaaggattaacatttcaactatcatcgaaatatgaatgtaaggaggaaaatcatgaatcctaatattgcaaaaatctcttcgttgctatcagatccctcgcgttcttccattcttctcagtctgatggatggaaggatacaccctgcgggagagcttgcatatctcgctaacattaaacctcaaactgcaagttttcacctgaataaattgcttgaagcaaagctgattagcgtagagaagcatgggagacatcggtattacagattggctgactcagatgctgcaaatgtgatcgaacaattgcttcatattgcgcctaaagcaaaagtcaaatctttaaaagagtcaaaagagaaaaaggacttgcatttcgcccggacctgttatgatcatttggcaggttatgtgggcgtgcaaatggcacattcactagttgagcaggggatgttaaaaaaagttgatttaaactttgaggtgacttcagagggtgctttattcttttcgaagttaggcatcaatgaagagcaacaacggaataagaggagagcctttgcccgctgctgtttggattggagtgaacggcagcatcatattgcaggagcattaggaaacgccctattggtgcgcatgttagaagaagaatggatcgttcgtatgcctaaaacgagagcgattaggattacacaaagcgggaaaatcgcgtttgaaaagcacctaaacgtgaagatttaggattttgaagcggaaacatcagatgatgaggcacgatatctaggaggagtaagatttgttctaatcttactccttcttcttattttgaagcagctcgattccccattgcaatagagatgcggttccaactgtttatttgattaatgatcagaacaaggtcaacatattgttcctcatcataatgttcccgcacccgatgatatagctcatcaggaacccttttagatggaatgagcgtgatgtgttcagatagttcgagagccgctttctcttcaggtgagtaaaaatcacattcattccaagcatgtaaacagtaaattcgctgttcagtttctcccattttgcgggcatcggacgtatgcatatctatgcagaaggcacagccgttcatttgagagactctgattttgattagttctctcgtcgttcggttaattgaggattgtttcgtgtatttctccatatccatcatgattttcataccttcaggtgcaatctcatagtaggacactctttgactcataaagcaagactcctttccatagaatacctagattgtatcccggtattgatcattttaccaatgtgcggtttgaatgacagctgtttcagcgtcttttggaaagaagcttctttgaataaaaataagggtagccagcaatgatgagtggagctgctaatgcaagcagtatccatgagcctgattggctgtctctagtgactctaatgaatatataagtaccgatcagaaaatataataaagcacctagaaaccaatacatgttcattcctctttttccttgctttttggttgcgcatttttgtctgtcatatggcttaatcgatcagggttctgattttttaataccttttcggtccggattccttttctctttaatgataaaattgtgagatcaatcgatttcaatgatgatcattccttcaatgaatagtaagttccttatgattttaaaggtaaatttgaaaagataaaacgtacatagaggcagaacgttcatgtacgtttgggcaatgatcacttgttggaaactctaatgtttccctgcacctgatattgttgtgttccttctcttcctataaaatgattggatacatgtatgtttgcacgttgaaatatgggttcgattttcatgaatctctattcggtgaaacaggtaaaggaagtggataaggtttgcttataaggaatccttttaaagataaatattactcacatgataggcgggcattaaacatgcttgcactcagagtgccgggcctggcttttattctcatgatctatatagcctctatcgtgctgcaatttgtttctgggggctggtccattttattgctttatgcgtttaccatattaatcgccatttttgctttgcttcattggcactcatatcgctgggttaagaaaagagtgattctgtatttcgcggtacaaggtttgatcacctttgcacttgctaatctcatgactggcttctttatacttgtgattatcggcctttatgcatttttaattggacaaattataggaatggcagacagaagaaggacttttctcattctttatctattgctgctgctggtcataaattcggcgtatcaccttcataaaggtgaagttttgcattttattgttattgctgcgccgatcatgattgtcatcatcacttatgccgcaacattttttgcccaagtcgatgaaaaaataaaagctcaattgactcttgaaaggctggagctggctcatcagcaggtagaacagctgacgctgcagaacgaaagacagcggatggcccgagacttacacgatacgcttgctcaaggtcttgtcagtttaaatatgcagctggatgcgattcatgttcatctcgccaaaggcaacacagagagagcgaaggaaatcatacaacaatcgatgaaaagagtgaaaagcacaatagctgatgcacgttcagctattgacgatctccgcagcaaatcagaagaaatcggtgttttaaaagaaagaattacctcgctaatggatcattttatagagtcgacaggcatggcttgtttattagattacagattgcatcaggtgctggatgtgcgtacagctgaaaactgttattacatcattggagaatgcatgacgaatgcggcaaagcatgctgaggcgaaaacaatctggatatccatttgggatgatgaaaagggaaggctccatttaacagttaaggataacggcaagggatttgatgttgaaaaaggaaagaaaaagagaggacattatgggcttcttggcatacaagaacgcgtcagggcaataaatggccaattcaatatcaagagtacaaaattgaaaggaacacaaattgagatcactgtaccaattcagggagagatgcaagatgaataaggttttaatcgttgatgaccatcttgtcgtgagggaaggtctgaagcttttaattgaaacgaatgatcaatacaccattataggagaggcggaaaatggaaaagtagcagtccgtcttgcagatgaattagaaccggatatcattctgatggatttgtatatgccggagatgagcgggttagaggccattaaacaaataaaagaaaaacacgatacccccatcattattttgactacatataatgaagatcacttaatgatcgaagggattgaattaggagcgaaaggatatctgttaaaagatacgagttcagaaaccctttttcacacaatggatgcagccatcagaggaaatgtgctattgcagcctgatatccttaaacgtctgcaagaaatccaatttgagcggatgaaaaagcagcgcaatgagacgcagctgacagaaaaggaagtcattgttctaaaagcaattgctaaaggtcttaaaagcaaagcgattgcctttgatttgggcgtctctgagcgaacagtaaagtccagattaacgtccatttacaataaattaggcgcgaattcaagaactgaggcagtaacgattgccatgcaaaaaggtattctgacaatagacaactaaactgcatatttgaaaattgcccaaacgtacatgcccgaatgtacgtttttttcatttcattgtcaactacaatgagaaagaatgtgatcaagcaatgtgttgaaaggagattatcatgtcaaaaatgttatatacattaggaggatgggttgctcgcaatcgcataaaagcaatatgtgcgtggatcgttgtgttagttgctgcgataggccttgcagtgaccttgaaaccaagtttttctgaggatatgtccatacctgacacaccttcggaaaaagcgatggatgtgattcaaaaagaatttcctcatggtcctgataaagggagcatacgggttattttcggtgctggtgatggggagaaacttactgggaagccagcaaaaaaagcaatagaagatacgttcaaagaaatcagtaaagatgattctgttgactcgattgcaagtccttttgtgacagggacaatcgcgaaagatggcacagttgcctatgctgatatccagtataaatcatcagcagatgatataaaggattactctatcaaacacttaaaagacagtttgaaaatggctgatgatgaaggattgcaaactgagctaagcggagatgtaccgggagcggagatggagataggcggtgtctctgaaattgtcggcattatcttggcttttgtcgttttagccattacattcggttctttattaatagcaggtttgccgattttaactgcactgattggtttaggtgtaagtattggactggttttgattgggacacaagtatttgatattgcttctgtcagtctttcattagccggaatgattggccttgctgttggtattgattatgctttatttatttttacgaaacaccgccagtttttaggcgaaggcatacaaaagaatgaatcaattgcgagagccgtgggaacagcgggaagtgcagtggtttttgccggacttactgttatcgttgcactttgcggattaactgtcgttaacattccttttatgtctgcgatggggctgacagcagggcttagtgtactgatggctgttttggcttccatcacacttgtgcctgcggtcttatcgattgcagggaagcggatgattccgaaatcaaacaagaaaatagaaaaacaaagcactgaaacaaatgtctggggacgctttgtcaccaaaaatcctatcatgctaagtgtatgcagcattctgattttgatcgtcattagtatcccatctatgcatttggaactgggcttgcctgatgctgggatgaaagctaaggataatccggatcgccgggcatatgacttgcttgccgaaggctttggagaaggatttaatggccaattaacaatcgtagcggatgccacaaatgctacagaaaataaggcggaggctttcgcagatgcagtgaaagaaataaagggcttagaccatgtagcaagtgtcactcctgcaatgcctaataaagaagggaactttgccatcattacggtcgttcctgaaacaggtccaaatgatgtcacaacgaaagatttggtacatgatgtacgcagtttatcagataaaaacggagtagatttgcttgttactggatcaactgcagtgaatattgacatttcagatcgcctgaatgatgcgataccggtgtttgctgtacttattgttggctttgcgtttgtattgctgaccatcgttttccgttcgctgcttgtgccgcttgttgctgttgcaggtttcatgttgacgatgacagccactcttggaatctgtgtatttgtcttgcaagacgggaatctcatcgactttttcaaaatacctgaaaaagggccgatactcgcgttcctgccgattttatcgattgggattctgttcgggttagccatggattatcaagtattccttgtcagcagaatgcgtgaagaatatgtaaaaacaaacaatccagtacaagccattcaggctggattaaaacacagtggtcctgttgttacagcagccggcttgatcatgatcttcgtttttgcaggatttatctttgcaggcgaagcttctattaaagccaatgggctggctctttcctttggtgtactctttgatgcctttattgtaagaatgacactgattccaagtgtcatgaagctgatggggaatgcagcctggtatttgccgaaatggttagacaagattattccgaatgtggatatagaagggcatcaactgacaaaggaaatacagccggaaatagatcatgaacaaaagaaacaaatcagtgtgtaatagaaaaagcagatcttttatgatctgctcttttgcttatggtagtatttagaagatgaagtcggcagttaaaaggagacgcttatggcgccatcactcattttcgatatggatggaactttgtttcatattggcagaagctgcatcatactagcaggcatcccaggagaagtgacatgattttttgactttgcattcactacttgatgccaaggatcttgagaatccttcttgaaaataaaggattttacaactgatcatataagaaacctaaagaaacaagcacacaaaaccagctgcgggttttgtccaagaaaaatagagtccataagagggactctattttttgaagtgcccggctagaagcatattgcaggactttatgaatgcaaatcactatcttataagcccttaccgtgaaatgcctgtttctgcattgaaaaaacgcattacacgttcatttacgtaagtgggttgttccatcgataaaacatgtccggcatttttaatgacttccgcctcaatatctggaacgaatgaagaggctcggtgcagggctgagtggggatcatagatgacttcatgttcaccaagtaataataggataggaactcttgctgaacgtaattcctcatcggtaaaaacatacggaaatccgtcggcattaggatttggatttcttgatccatcctgccacattacccctgccttaaactgcttcacaaaaatcgggtgcagcacattctgatcattcatcatccaatttaagaatgtttcaactccatttgacgctgtaaggccaagagcgtatttgtagaaatcgtgatgaaatggcaaaaacgtttctgccggactcagtatagctgcgctttttactctctcaggcatacgtaaaaggaaattcatcgtatggagaccgccaagcgaaagtccgatcatgtgggacttttcgatccccagattgtcaaacacatcaagaagccaattggcgtaatccgttcttgtaccgcttacattctcaggaatactcttgtttttatcacctatgatatcaactgcataagttctgtatttactgctccaatcggcgatgttgggataccacatcgtcgagctgaataatgctccgtggagtaatacaagcggcggggcatcctctgggccgcttgcaatcacatgtgtttgaccaaaacgagtagatatatagaatgatttacaacggaccggccaaagactaaggctttcattataagtttgataatagcggataccgttgtcacttaattcgggaatactagatgaatggtttgacatacaaatgcccctcccaattttgtttaaatgaatgtgccgtttcgtgatggggaatctgattttgatataacagactttatttacaatataatacagttgttattagacgtcaaatccaagatgaaaaggaaaaaaacgattgaaacagattattgaaaatcaatataacagaatattaacctcctttgtggagccgcttcattaaaaccgcaatccaaatgcatgaatcacaaaaatcacaacaggagggatcaggagggaaggcagcagattcagtgttttgaacttcttgattccaagaatgcttagacctgaactgaggatgagtatgcctcccacaattgtgatttcattaataaggtctgtattgattgcgctctccattacttgtgcaaataaatagatggagccctgccaggaaaataatacaagtgcggcagccgctattccaaaaccaaaagttgaagcgagcacaatggaggtgatcccatctaacatcccgtttgtcagaaggtatgtataatctccatgcaaagcggcttcaacagggcctaatattgacagcgaacctatacaaaataataagaccgcagttgataagccctctgctaaattgcttttagaaaatttgttcaccagcttgttgaatcgtaattctaaattgatgatctggcctagcaaacctccaatggctaaactcacgatgaatagaatggggtatttactatcaggcaaatgctgtgtaatggcgttgatccccagtgcgaccgcagcgaatcccattgcctgcatcaaaatatcctggtattcatctttaatgccttttttgaatatccccccgattatgcttcctgcaatgatcatcactgtgttaaaaatcgttccaaacataagctttctcctccaaaaatcattcctgcataaaaaataaaccctctagttagtagagagtcaagggagatcaaaacatattcatgagattatttgatgggcagcaggatttcagtcacgtaattatctaggttattcgtaatgccataatcaatgagtgtgatttcgattgagtcccctgctacctcataatgatgttctttcatatatgccagtaattttttgtagtatggttcggcttctggatgtgaccctttaaacctaatttgcagatattctcttgaaggaaagatgatttctgaagaagttttttcattttcatcttcaagaatcataaatatactggaatatttgtcaaactgttttgctttcacatttgctgcagaaatggataaaccaatcttgcctatgaatatatcttcgtttacattcaggtgggttctcaattcagctaacgaatgttcgatatcatggccgagaacatattcatgctgcaaataggccacacgcattgcgggaagtttgatttttgaaatttgatgtaacggcatgttaacggcatcttctatatgtgtgatgcgtcgggagatctttcgttcaatgcgttccaattctttcttcttgcgatcaatttcaacctgctggctttttagtaaatgaagaagagtgtttgtattttgagagttataaaaatcaagaagcttattgattggcaggcctagggccctcaaatacttgatggtatccagccgctcaaactgttgggtagaataatatctatagttcgtttgctcatctttatattccggtttcaaaaggccgatttcatcataataccgaagagcagagattttcacattgaataactttgacacttctccaatcgaaaaaaattccttcattctaacaacctttctgtcctatgattgatatacacacattatatagtacggcgagtactaaaggtaaagtttgcagcataaagaaaaaactccttctaaaaaggagcttttcattcttcgaaataaggatttacatggatgagcacttcttctacatctgaaaactgtcttttgatttcatttcgaatttcgcgggcaatgtcgtgtccctgcttaattgtcaaatcatgatccaaagataaacggacatcaagcaatttatagtggccatgttctcgcgcgcggattctatcaattcgttttacctgatcacattgaaaaataacagctttatattcctctatcagctcgggatcaacactcttttccatgagcacatcaacagacggcctgattaattccattgaaatcttaaaaatgaggtaagcaacgattgcactggcaatggcatcggcgtacaacagataggaccatccacggctgtttccgatgatagccaacaggacgccgataaaagcggcaagagaggcaacgatatcgcctttatgatcgtacgcaatcgctataatcgctttgctgttccattttttcccttgctttatagaataacgatataagatttccttagccacgtacgaaatcagagccgcaaacaatgcgctgtattggggaacgcttggccctttaacaaaggacagaatcgcttctatgaggatataaacggatacgatcactaagataattcctacaatcgcctcactaatgacttcagcttttccgtgaccaaaaggatggtcttgatcgggcggtttattggaaattccgatcactgccaagactgcaatcgaagcaacgacatctgccgcggaatgtattccgtctgcaaacacggcttcactatcgcctaccagcccaaaaaagacctttcctgccattaagatcagattggcgatcaatgcaatcaaagcaacttttctgcttatttgttctctttcacttgccattttttcctcctataaaactgcacaaaaaaataggagtgctctatatacgctctccgtatcctttcctgtgtaatcactttgtttatcataccaattcaatttcgagtgggtctatagcaacgttgtttcctgtttactaataaataaggtgacagaaaaaaagttggagctatgctaaaaaggtcatacagcaaacaaatgagttcttatgtaacaacagtgatgattcgctattaaaatgctgccgtcagtgaaaaatttccacctaattttcaaaaacctattgacatgagaagatctgtattttactattatctcatattcaagatattttaatttgagatatttggtcggaaagatcagcgatcaagcgcaactctaagtgttcaatcgttgtcagttcttttacacaatattcaatatgattttttataacataatatctcgaattcgagataaaagggagtgtagcgtaatggctgaatttactcatttagtcaatgaaagacgatctgcaagcaattttctttcaggtcatccaatcacaaaagaagatctcaatgagatgtttgaattggttgcattggcaccatcggcttttaatttgcagcatacaaaatatgtgacggttcttgaccaggacgtaaaggaaaagctgaagcaggccgcaaacggacaatataaagtggttagctcttctgcggttctcttggtattaggggataagcaggcatatcaacaagcggccgatatctatgaaggtttaaaggtattggggatattaaataagcaagagtatgaccacatggtgcaagacaccgtttcgttttatgaaaacaggggagaacaatttaagagagatgaggcgataaggaatgcttcactttctgcgatgatgtttatgctgagtgctaaggaaaaaggctgggatacctgcccgatgatcggctttgatgcggaagccgtaaaacggattttgaacatagacgaccaatttgaggttgtcatgatgattacgattggaaaagaaaaaacagagagcagaagaccgcgcggctaccggaagcctgtgaatgagtttgttgagtatatgtaaaaggagcggataaaaatggctaaaaaaacgatgggaattcatcatattacagcgattgtcggtcaccctcaagagaacacagatttttacgcaggagtgcttgggcttcgtttggtcaagcaaactgtcaattttgatgacccaggtacgtatcatctttattttgggaatgaaggcgggaagccgggaacaatcattaccttctttccgtgggccggagcccgccaaggcgtcattggagacggtcaagttggcgtgacttcgtatgtcgtgccgaaaggggctatggcattttgggaaaagagactagaaaagttcaacgttccctacaccaaaatcgagcgctttggggaacaatatgtagaatttgatgatcctcatggactgcacttagaaatcgtggaaagagaagaaggagaggctaatacgtggactttcggagaagtaacgcccgatgttgccattaaaggttttgggggtgcaaccctattatcagagcagcctgacaaaaccgctgaccttttagaaaacatcatggggctggagcgagtcggcaaagaaggagacttcgttcgttatcgttccgccggtgatatcggaaatgtgattgaccttaagttaacgcctattggccgcgggcaaatgggggccggaacggtgcatcacatcgcttggcgggctaacgatgatgaagatcagttagattggcaaagatatattgcttcccacggatatggtgtaactcctgttcgggatagaaactactttaatgccatttacttcagggaacacggggaaatcctgtttgaaatcgcaactgatcccccaggctttgcacatgatgaaacacaggaaacaatgggcgaaaaactgatgctgcctgtgcaatatgaaccgcatcgcacacaaattgaacaagggctgctgccgtttgaagtaagagagttagattgatttgacacataaaaaataaagaaacatatattcaattgatgattgctggatggtactgtcagcaaagaatcagataaaatcaaagatgaggagagatacaaatggaagatgcaggactgttgcttattcgtataatgattggtgtggtgtttttgttttatggcacacaaaaattattcggctggtttggcggatacgggattaaaggaaccggacaatggttcgaatcaattggggtgaaaccaggaaacgttgcggccgctctatcaggtcttggggagttagtaagcggaattctatttattttaggcgtattcctcccgcttggagctgctatcataacaatcatcatgttaggtgctatcgtaaaagtccatggagcgaaaggttttgcgaatggcgccggaggttttgaatataacctggtgctcattgcagtttccataggggttgcactcatcggttcaggagcttacgctttgcatttttaatacgaaagtatgtaagaacagttgctgcttgtcagtaactgttcttttattttcacattttcggcaagcttgcaggtactctgcaaagcaaaaaagcggatatcataaatataaatctgtatagtgaatgatacgtattgatgagcttggtcatgaaaaacagacctatttgaaggagtaaatggatgaaagagatgacaggattacattcattagtttctatagaaaactttatcaaacagcacaaattcagttttatttatatatcaaggcctggctgtacagtatgtcacgcagttctgccccagctcagaatagtattggatcagtttccaaacatcaaattggggcatatcaatgctgacgatgtagcagaggtcgccggcagattttcagttttcaccgttcctgtgcttcttttgttcattgatgggactgagtttctaagagaagcccgttttgttcattttgaacagcttgaacaaaagctgaaaagggtttatcgattatatgaaggcgaataaaggaataaggcaaaaaaagaactcaaatgagttctttttttattcttcactaggcgaagaagggttatcaacctgcccttgatcacttgtatcattatcacaacttgctgaaataataattgaatgagaaggagagtaatctcctaatgtgaaattcactccgtaatttttgctgttcgcagtatggctgttttgcaagttttgtccgatatctgtattggcgttttgtgtcattccatttatcgtgagatttgagatgttgatttgagatcgcatgcttcaaaaactcctttcactcagaagtagctgtcataaaggacgctggcagtctatttacttctatgatattgcgtttttatatcattgcatcaacataatggtaaaaataatagcgagtgaatgatcatcttttgaagatgatcaacctatcagcagaaataaagccgcctgataaagaggcggcagatcgttatatgtcatctatgaatttgatgtatcgtttttcgtttgcctgaaggataagatagtcgtttttaatgatgagtaggagcctatagcagcgtagccataaaaccagcccataaatacgccagaaaagaggctgtgtcgatggcttatgaaaacagaaatgacaaggcctgttattaaggcaactgacggtacaaaagttttggggattttcaataatattttgaggatttgggttatcaatatgatgattggaacagctatcacagcatcccaaaagttcgtgtgaataattggaaaagccatacggcacctcatgaagtgtttatttcttaatttttacgctaaaagcttggaaagcagctcttggatcgcatatgttacattttgggcttgattggcggagcttgtttggcttaaagcattggattcaaaaaccaaacctgtattactcccaccggaaccctctgttgttttagacacagagaacgggctgatggaaactgcaaatccgttattaaaaacgctgttcccggatatcgaatgaatataaactgggaatttcatcattcatctctcctctctgttatgactgtttatacaatatggtgtgtgagcagcagttgcttaaacaaaacggcaaaaactttcagtaagagacaaaaacctgcaaaatgccacaagcgccttttgttaatgcagctttttagggacgttttttttattttttttgccaacttcatcaaaaatattctgattgccagactgggcttgtccgtccttatttatgaaatcggggtgaatgagttttttcagatccctgactgttaaaggcttggcgtcatcagttaattctattcctaattgcccgtttgcctctaatgtcgcaattttgacatcttgtatagccgtaacgccgtgaagccttagctgcatttcaagctggtcagctgtaagtctcatcttctttaagttttcgatatgaagctgtccgttttcaatgacgatttttgcttttccggttaacatcttttcaatggtgttcgatttcatttggatccattccataacgatgagtgtgcttgtgaaaattgccgctgcaattaatgttttgaagaggctgtactcgatgattggctgaacgataatagttccgatcgaaatcatgacaaccgtttgagtcgacgtcatttgtgcgattgatttccttcctgaaattctcagcaaaatgaccccggctacaatgagaacaagagattcccaagtgaaattcatgctaccacctgaccaatgatgaattagatttgtcatgggattggcttttcttccggccaatcgcaatttaatatatccgaaaggcagtcggttcattctgtcctgaaccgaacaatatttttggtatagatggatatattaagccaaacaatgatagcaacaggagttttttggccgaaacaatctgggaagcggggagcgccataacatgattgaacttgaagttgtcattagaacggttgccagctttggcttgctgttaatcgcagaacgaattttaggcaaacagacaatctctcaaatgacgatttttgattttattgcggcgatcacactaggggcgattgctgccggattagcttacaatacttcaataaaaccgcacaatatggccatttcgtttagtatttttgtgctaaccatttttctaatttcgtttctgtcgataaagaacaggaagctgaggaaattttttgccggagatccaacagtgctgattcaaaacgggaagatacttgaatcaaatatgaggaaaatgcgttacacacttgattatttaaatcagcaattacgggaaaaagaaatatttaatatcgaagaagttctttttgccattcttgaaacgaatggtcagctgactgtgttaagaaaaccgcaattccggcatgtgaccaaacaggatttaatgattgcggtaaaccaagaacaaaggcttccgatagaacttattatggacggagaaatcattgagaataatttaaagcagaatcgtttgacggaatcctggcttttggaagaattgcgaaaaagagacataaaggtgaaagagaccgtgtacgcagtgctgctgggtaatggggatatttatgtggatcaatataaagaccatatatcagtccctatggataaggaatgaaggaacaatcaatcttaaagccccttattgaacgcaacggtttcaacttgtcttgggtacgaaatatgcagaagcccgtttaacagctgaatctgtaacaaatgagtttcagcggcttcgggaagctgaatgattcgctcaatttctccgtaataccgttcacgcagcacttccatttcggctggaaaaacaggcgtgatcgttcctttgatcagcagctgggttttagacagtaaacggatcgttaattcttcctcatacacaccgggcatttccacaatgataaaattatattcctcatcttgataaaagtcgtaaacaaacgtagaagcttcggaatcaaaaaaatgttccggggctttatatttgagcacatttgtccaaaagtcactttgtttatattcattcgtaatctcaagccactttcgaattttttcgaaatccatatgagattctccttaaatttgatttgaaatcggcgcagaagggtttccgatttggtcttggtcactaacgtctgaatcaatatttccagtgtttaaaagtgaagacgtaggcgaaagatcccctaaggaaaagtttgctccaaaatatttgctgttcgcagtatggctgttgtgcacagtcggaccgacatctatatttccgttttgcgtgacgccgttgatcttaatatttgcgatattaatttgatatggcatagacgaaacccctttaatctaaaattggcggtggtgcaatcggaggagcattaacgttggatgtatcagagttgccgatagatgtctggtcatttacatcaggatcgtttaagaagttttccattacggattctgtaggtgatgtatcaccgaaagaagagttggtcccttgagatttttgattgttggtagggctgttataagcagcttcgcctattgtaattgaaccattgcccgaaatactgttgatcttcaaataatataggttgattactgtagacggcatcccatcacacccttccatctttctgtacagtacattatgcgccgctgcacccaattgttccttgcatttacgggcaaaactctatctggccccggagtgatgctcaattatcagtgaatgaaaagccattgatataggaatcaatgaattgattcagttattcgaaatgcatgagaccttttaataaaggaagctggcaaacaggatcagtttgaaataattgacaatgaagctaatgccatgaaataatactcgtgagtaacattactcgtgggtattatttttggggtggtcctagttgaaaagtaaaggagtagaaagccgaaaacgattacttaaagctgccgctaatgaattttcggttcggggattccatgacgcgaaggtaagtgaaattgtgaaaaaagctgggttcacgcagccttcattttacctgtactttcaaagcaaagaagccatctttgccgagttaataaccgattttcactctcgagtcagaaagctgacagagtcacttcttctggaaaacggattaaacacggaggatgtgtcaaaacgggtactgctagctgtagagactgtttttcaatttttggatgaggacaaggatttaaccaagatcggcttttttctcaacccggaagcaaaacaaatgaaaaaagacttggcgatggttttgaaagagaacttagaagcagaacagcggcttggctattttcactctgaactggatatggaaactgtcgctgagtgtttggtcggcatgattgaacatttaaccgaatcatttttgttaaccggaatcaaagatccggcaagcctcgcagcagaggttgtgaatcttttaatttacgggatgcttccgaaagggaatgatgtaagatgatatctattatgatgaaagtcagtttggcagtttttatgcttgcgggaggcatcataaaggtaagccgcgttccctttcaagttgagcattggcggcattatcaatatccattatggtttctgactgttactggcattcttgaaatagccggggcacttgctatgacagcgggaatttggaatcggtatgcagcaattggagcaggtgttctgtttgtcgttctcatggcgggagcaattcatgcgcatatgtttcgagcaagacaatctgtcatcatggcgatacaagcgatgatttgtttgattgtttcaatcatgatcatcatggggagttacacgtaagcttttcactaatgtttaagaacaagcccatttgcaggaaatctccttttcttatcgaataatagaaagtccaggaattaactgaatcagtaaaatagagctccatttctgtgttattcgtccggcatcagctgggctttttttataaaggaggaatacaggatggcattcactttggaagacatgactgaggaagagttcgaagcctttcgcgggatgtccgtgcaaaattttgcgaaacaaaacataacgtcaggaacttggacggaaaaagaggcatttgagaaatcggagcaggcatatgagaacatgattccgaatgggcgagacagcagcaatcattatttttggaacatcacaaatgaccaaggagaaagaatgggctggctctggctgtatgctgatccattacatccgcaaaaggaagcgtttatctattcctttggattgtatgaagcctttcgcggaaaaggacttgctcaattggcgcttcaaacgcttgatgaaagagcaagagagcttggtgcggaaaggctggctctacatgtatttgcacacaacgagacagccgtctatctttatcagaagatgggctatgccatgaccaatatacgtatgcggaaacagctatgctgaaaagccgcttacgttacccaaatacaacatgcctatctggaagcggtggcagggtactataagtcatcattagaaagattaaggtcatgggaggcttgaacatataaagaaaaaggacaacagctgttgtccttttcaatgccgcttgaactttctccctcagtcttttttgtcttgatgatccagctcttttattcgtttcgtaagctcattgaaagcctgatcaagctccttataccctttatcatttggcgtcataaaactgagctttcccagcacttcttgtctttctgtctcaagctttaaccgaagctcctcccgctcatttctttctgaaggaacgtcgtttaactgcttttcgatgccgttgtttgagatgacgagtttactgtttgttgttttttcgagaaagtatcggtcatgtgaaaccgccagcaatgtgccgctgtattgtgacagtgtttcttccagctgttcgcgtgacggcaggtcgagatggtttgtcggctcatctaaaatcagcacgtctttttcctccagaatatatgccatcagcttgatctttacacgctcacccatactcatatgcttgatcggttcagtccattgggcggctgtaaaacctaagtgcctcatcagattttgaacgtgcccccttgctttgaatgtttcattctcaaataactcttccggtgtttgttctaaaggcaaatcaaacacctcctgcgttaaatagccgatgtttgcggacggcgacacccatacacttccttctgctgtttcctgtcccagaatgatgttcagtaatgtcgtttttccgctgccattggggcctatgatcgcaaccttttcgccgtgctgaattgtaaagtttgcgtttttaaagagagtcctttctccaaacgcttttgttacattctgaacttctaaaaaacgttttcctgttttgtgggttgtatcgattgaaaagcggactgtatattctggggtaacgggttccgcctttgctttttcaagctctttttcaagccgcttctgcttggattttatctgggcatccgtacgcttcgcttttacccggtgatattctttaaacccttcctttttcgtcgattgagcatgggctttttccgaccaagaagcgagcccattcatttgtgcttcaatccgttcaaccattttttgctgcttttcatattcacgctgctgggtgagtcttttcttctcccggaacttcatatacccggagtaattccctttgaattcaatcagcgtctgatcctcaagcgaccatatttttgttgcggcttcgtctaaaaaatatcgatcgtgagaaacgagaatcacagtgccgttataatgtttcagctgttggatgagaaattgcaagcttttttcatcaaggtggtttgtcggttcatctaacagcagcagatctgcatcctctgatagtcctttcgccagccgcgctttcagtttttcaccgccgcttaactgatgaaaatcacgaagaggcacatgccatttctccagtaacttcttttcggcaggtgtctgatccgcaaaggaatacgccgcggtttcctgttcaaccaaagccagttttatatccttccgaaggatttgaccctgtgcaggggctaagtcattgtgaatgaggtgcagcaacgtagatttcccagcgccgtttttgccgataatcccaatgatatctccttgctgaacactggcgtttacatgtttaaaaacagtttgatcctttacttcatagctaacgtttgttaatgttacgatctctttcatccatatccctcgctttaaagggagaataaaaaaatcctcccaaatgtgttggaaggattagccgtgcctgtgcatgatcaaataagctattttttataaatagcagtgtcgtatatatagaaaatgggcagactaatcctattttttgatttgaaatattgatttcaaacggtaaaaataagattagttaatcattgtccacccatcatcccttcttgttttgattacaaacactatagcatacctttaaattcaaaagcaaaggtcattttcatcaaaaaaactcctgctctcatttttgaggcaggagttttgagtcttattgatgcttcgcttttctcactttataaatcacaatcagcaaaataaaccaaaccggtgtgacaaataaggaaacacgagtatcctgtgccagtgccagcacaaccagaacaaacgccaggaacgcaagaatcaggtaatttgtaaacggataaagcggaagcttaaacttgtttgttttcgctaattcaggtcttgttttgcggtatttcatatggcagatgaccgtaatcccccaaatgtagataaagcatacggttgaaatacttgtgatcagggtgaatacgccttctggcatgatgtagtttaacgtaacaccgattaaaatcacgatagctgaaaagaataaagcatttctaggcactttacgctgagtcagtttcgccattgactcaggcgcattgtgatctttcgccagggaatagaccatacggcttgtactgaatacagcgctgttgcatgctgaagcagcggatgtcaacacaacaaagttgataatacttgcagccccgacgatgccaacagcgacaaatacttgtacgaatgggctttcgctgggattgatgatatcccaaggatagatgctcataatcacgagaagagccccgatataaaaaagcagcacacggacaggaatattgttgatcgccttagggattactttttcagggttttctgtttcaccggccgtaagcccgacaagctcaatgccgacaaaagcaaacacaaccatctggaacgagaggataaacccgtgcatgccattcgggaacaggcctccgtggctccagaggtttgtgaagctggacactcctgagcttgtggaaaagcctttgaaaatcatcacaaggccaatgacgattaacgccaaaatggcaatgactttaatcaaagcgaaccaaaattctaattctccaaaaagcttgactgtcgccagattcataatcagtaaaataataagagcgattaagccaggcacccattgcggcacacccgggagccaatattgagtgtagagcccgactgctgtcagatcagccatcgcaatggaaatccagcagaaccaatatgtccagccggtgataaaagctgccatatcgcctaggtagtcttgtacaaaatccacaaaagagtgatagttcaagtttgataacagcagttcacccagcgatctcataattaaaaagcaaatgatccctgtgatcatataagcaaataaaatcgaaggtccggcaaaatgaatcgatttgcccgagccgagaaataagcctgtcccaatggctccgccgatggcgatgagctggatatgcctgtttttcaagcctctctgcaacgtttgctgatttatattgtctttcgtcatgtcgtctgtcactttatgtgttcctccattgaaaattgtttattgagtcagcaatctatttttaatgattattataacactaaaatttctatcttttttactaaaaaaggattgatgaaaagaattttaatgtgatttggactatttcccgaaaaaagcggctccatttagggagccgcttttttatgctttttcagtttttgtcataaacaggtagagcccgtaatctgtcggtgcggatgcgtagcctgcctgccgcagcattgctgtgatattgccgcggtggtatgtcccgtgattgacaacgtggggaagcagttcggaaacagttgttttcatgattccgcttgagggattttgaatctggagtggcttattgagctgttctttttgctgtaaaaatagtatatagcgctcggataacctcagaaaaaggtcttccatttcctctatttctttagcctctgtctgttctttaagctgttcagctaaagccaacgcatcgctcaaggttttgccggaaaacacttcaatccagccgagatcagaaagataaacatgagacaatacatgggatattgacggaaacacgctttgaatttcttgatggtatatctcttttggaagctcttttaatcggttgaatatttgttgattggcccagacgttatattcatacaatttgaatgcaaaatctgacatgttaaaattccccctttcgtgtgtatagctttcattatacacgaacatgagttcttatgtagagtgctcgaaaataaaatttgttgacatatatagtttagaggaataaactaattgacattgaacataaagtttagcggggtaaactataatgaggaggggaagatattgaatgaacaaaagctatgtcaggcgataaacctgtttgtggaagtcctgcttgaagggacagaatttgtgcatcgtgaaatcaatcaggatgtcttcaagcatatctcaagggaacaggcagacctgttgaaaattttaaaagtcaagggcccaacctctcccggcagcctggccatgtaccaaaatgtacataagagcgcgatctctaacagactgaaaaagctgctcgaaaagggattggttcaatgggacgactgtccggaaaaaagtgataggcgctctaagcttattaacattacacccagtggtgaacacatactagaagaattagattctgccatctttaacgcgctcaaaccgttgattgatgatatagatgaggaacacttacattctatcatcgagatattcaccattttaaaaagcaaatttaaaggaggagattctgccgaatgagagcaatcatcaaattcaagtgggcaattgcagccatagtattagcacttaccgtcgttttgagtttgttttctccgaacttaacggagctggccaatcaaaaggggcaggcccagcttcccgctgatgctgtttcagaaagggcaaacgccattttaaaacaagcgggagaagacaataattcgatcagtgtagtctttacattagacaacgctataaagaaagaaacagagaatcagctccggataataattgataaaatcaaaaagatcgacggtgtagaagaggtaacatctcctctgtcagcggaaaaagaagtcaaagaccagttgatgtcgaaagacaagaaaaccgttctcatgcctgtcacgattacaggttctgataaaaaggcggaaaaaattgcggacgagatttatcaaatcgttcctgatgacttgacggcatatattacgggagcttcccttatcaaccaggatttcgctcacagctcagaggaagggcttaagaaaacggaagtgataacagtctgcctgatcatcggtttactgttgatcgtgttccgatctgttgtgacgccttttatcccgattgtggttgtcggtttttcttatctgatcagtcaatctatactgggcatccttgtatacaatgttgattttcctatctcgacgtttacgcaaaccttcttagttgcgatcctgttcggcattggaacagattactgcatactgcttcttacacggttccgtgaagaattggcaaacgggcatgataaaaaagaagcggcgcttatcgcttaccgcacagggggaaaaaccttatttatcagcggatttgcggtattgatcggattttccgccttaggatttgcgaagtttgcgattttccaatccgcagtaggggtagcagtcggtgtgggaattttaatgatcatcctctacacactgctgccattatttatggtgacgctgggtgaaaaattattctggccttctaagaaagtgctgtcacacagtgataacaaactatgggcgtttctcggcagacactccgttgcgcgtccgtttctgttcattgtcatcacggtggtgattacgcttccgttcatcttgacctatgatgaccagatttcattcgactcaactgcggaaatcagcagcgattataaatctataaaagctctcgaggccattaaggatggattcggggaaggaaaagcgttcccgatcaatgttgtcgtaaaaggagacaaagatcttacaacagctgatacaatcccctatctaggaaatatcagcaaagcgatcgagaaagttgatcatgttgactctgttatgaccattacgcagccgactggtaaaaaaatcaaagatttatatattgataaccagctaggatcggtttcagacgggctggataagacggtgaaagggattgccgatgtccaaagcggattaacggatatagaaaacggactgaatcaaatggcagggcaaaccggctcggcctcaaatggagggtctggcggttcactgggcgatgcggcagatggcttgggcaaaatcaatcagcagctgcagctcgtgagcaaacagatttcccaaaccggcaataccgcacagaccgtgcagcagcttacggcaataagcggacagcttggccagattcaaaccggccttgaacaagcgaaccaacagctctcaggccagcaggcacaagccggaacgctgacagaaagcctgaaaaagctgtccgaaggcgtgaaaagcgcaaatgagggcctgacgaaagtctctgacggtattacagcttccagtgatatattagaggacatgagcaaaagtccaactgtaagagatactggcatattcattcctgatcaagtaatgaaggacaaagactttaagaagtcaattgaccagtattcctttgcagacggcaaaggtgttcaattaagtgtcgttctggattcaaatccgtactcagaacaagctattacgacaataaaccaaatcaaaaaagctgtcgcaaacgaagttgacggcactcctttggagaatgcacagatcgtgtacggcggggtcacgagtatgaatgcggacttaaaggagctatccacaacggacttctccagaacaatggtgattatgattataggcctgtttatcgtgttaaccattttgttccgctcaatgatcatgccgatttatatgatcgcgtcattgctgctgacgtactatacgtcgatatccataacagaattaatttttgtaaacggcttaggaaacgcgggtgtcagctgggcagtgccattcttcagctttgtcatcttgatcgcgttaggggtagattattcgatcttcttgctggatcgatttaaggaagaggtgcaccttggcattgagcaaggtgtcgtcaggtcaatgagcaaaatgggatctgtcattattacagctgccattatattggccggtacgttcgcggcgatgatgccttcaggtgtcaatacactgatgcaggtggcaagtgttatcatcatcgggctcttgctttacggccttgtcatacttccgctcttcatcccggcaatcattgcgacctttggagaaggaaactggtggccgttcggcaggaagaaaggaaaagagtaatcgagagaagagtgatgaatggtcatcactcttttttcatgactaaacgactaacttcagacgtgttacccaaaaagatcagacgatcaaacggcggctgtacttaaaaacaaagagcccggaaaacattcccgggctctttgttttatttccattctgcaattgtatcaatcggcagacggtaggaagcatagccttcgtctgctgcttttccgatagaaagtagcataaccggtacataacgttctttatctaatccgaaggtttccgcgatgttttctttatcgtatccgccgatcgggtttgtatcgtagccatgcgcgcgtgcagtcagcatcagctgcatggaaacaagacctccgtcaatcaggatcgtttcacggttgacctgtgccggaagcttttcaaaatgtgcggtcagcgcggcgatttgtctgtctttgacctcctgcggcatgtaaccaagttccacggcttttgaatagatttcttctagatagtctgcgttgttcatgtctgcaaatacagcgatgacagcagatgatgttgtgacttgtgtttggttaaagcttgcaagcggtgcgagcttttcttttccttccgggctgtcaatgacaagaaaacgccatggctgcgcgttaacagaagatggggcagttgttgcttcctctaagatctctgtcatttcttctttgctgatttttactgccggatcatagttgcggatagaacggcggcctttcataatttccataaaatcgtttgttttgatcatgttgatacactcctcttaagcttcgatattatttatattgtttcgcatgcgcgccagcacatcaatgagcaggcggcgttcttctgcgcttacatttgcgagcatttccttcatgaaacgctccttttccttcttagaagactcaattcgctctcttccttggtctgttaaccgaacaagggtgatgcggttgtcctcaggcttgcgccgccttgataccatgcctttggattccagctgtttcaggtgtctggtaacggctgcgctatcgatatttactttcttttgaaggtcgctttgactgatctcatctgcatgataaagcaatgtcagcaattccaaacgagattggctgatgcccgtgcatgcctcgaacttcacgccaatcaccttgttcacgccttgcagctgatataaaatctcggcttcctctgaacaaaatgacgccaaaacccatcccttctttcctgtcaaaactattaattgatatatcaatgattgacacgtcaattaatatacaacgattgatttcatcttgcaagccatttgcacttttgaacaacctcccagcgcataaaattcgctaggctagaacttagcaaaaaaagctggccgcttcttcagatgatgctggtcacgatgattccctgcatcattcccatttataggtgttcggaatatcactttgccggcccgtgctcaagcggctttcacaggctgaaagttatgatacaatatacaaatgtttcacagcttcaatccatagttggagctgacatccattatataagggactaggttgaagggaaggtttgataacatgctgcacaatccaactggaaaagaacgcttggcactagcgtttctgctcggcatgcttgctatattgggcccgcttaatatagatatgtatttgccaagttttcctgaaatcgcgaaagatttatcagcaagtgcttcacttgttcagttaagtttaacagcctgtctggtcgggcttacgatcggccagctgattgtcgggccggtcagcgatgcgcagggaagacgaaaaccgctattaatctgtatttttttatttgcgttatcttctctgttttgtgcactgtcgcccaatataacaactttagtggctgcgcgttttttacaaggcttcactgcttctgcagggcttgtgctgtctcgcgcaatcgtccgcgatgtgtttaccggaagagagctttctaaatttttctcgctgttaatggtcattaccgcggtggcgccaatggttgcgcctatgacaggcggtgccattttgcttttgccgttcgcaacgtggcatacaatttttcacgtcttaatgatcatcggatttttactagttcttctgattgcattgaggttaaaagaaacgcttccgctggaaaaacggattccaagctcaatcggaacatccgtcaaaacgatgggcagcctgctgaaggatcgatcctttatggggtacgcgttaactgtcggatttattcacgggggaagctttgcatatgtgtctggtacgccttttgtataccaggatatctacggggtgtctccgcaggtatttagtattctttttggcattaacgggctggcgattatatcgggcagctttatcatcggacgctttggcggaatcattcatgaaaaaagcctgcttcgtatagcggtcattacggctatgattgcgacggctgtgctattaaccatgaccatgattcacggtcctcttgctacattagtcatatccattttcatttacatgattacgatcggcatggttctgaccagcacgtttaccctagccatggaaaagcaggggcaccgcgccggaagtgcaagtgcgctgcttggaatgcttccgctgctcctcggttcaatcgtgtcaccgcttgtaggcattaatgagacaacagccgttccgatgggagccatcatgtttgtgacagctgtcatcggctcactggcgttttttggattaacgaaagaacgagtagggcagaattcataaaaaaacctgacatgacgtcaggttttttgttttatttagaataacaacagcaggcctgcaatcgccggagtcaaaaagatggctgatttcaaaaccacctttggcatgaggttggtgaatttcgcgcctacataggccccgcacattgtcccgaccagaactttgacaagtaaaacgtaatcaacaaaaccttctgtaatatatccgatgcctccacctacagccagagggatgatcacaagcatcgtcgttccgacagaatggcgaatggacagattcagcataatcattaaaccgatttgaataaaaggtgccgacccgatgccgaatgtgccggaaagaacgccggctgcaattcctaagatgaccgctctcgtatacgttgaaagagtgctttgattcacttgagccttctcttttaaaataaataatctgattaaaatgagaattgctgataaaaataacattccagccgtcaaataatgaagcaaatcagccggaataaaagaagtcagcttggcgccgaaaaatgagccaaccgcagcaaagcctccgactattaagccgattttcatttgaatgttaccctcgcgatagtggctgtatgcccctgataagcttgtaaaagccatgccggcaagcgaagtgcctaaagccgtatgaatcgggatatggaaaagaagcgttaaaagggcaatgacaaagccggctccaccggcgccaataaagcctaaaataattcctagaagaaacataacaagaataatgagcatattttttcctccattgaaaagatgtaaaaatgtaatcgtgcgctattctggcggaggtatggtgtcctattgacgaagaaaaacacgccgttttttcagttgccagtagtccgtcgaccgtcgttcagcaaacatatcgtacctcaaattcagggatctgacaaggcagtttgttgcttcccattaccatctgttatatgattttgatgaagaaaagcccttgaatatattcaaaagaggtattatatatggacgattttaaattagataagccgactccctactacctgcaattttataaccagctaaaaaaaatgatcttcaacgggacttttaagcctggggaacggataaacgaaacacagctggcgaaaagctttggcgtcagccgctctccgataagggaagccatgcgattgcttgagaaagatggtttgttaaaagcggatgaccgaaatgggttttcgatcacgtcgttaacggcaaaagatgtagatgagatttataaaatcagaattccgctggagcagctggcagtcgaattagtcatagacgaagcggacgaagaagagctgaccatactcgaaaaacagcttgaagaaacagagaaagcgattcacaacggcacggaagatacagaaatcattcgtttaaaccaaaaatttcatgagctgctggttgatttcagccataacagacatttgaaaaatttgcttgagcatgtaaatgacctgattcatttttgcagaatccttaattataccggcgaccaccgcgcagaaacgatactgcgtgagcaccgcaggatatttgaagaagtgaaaaagaaaaacaaagaagcagccaaacaacatgtgctggctcatttcaatcatgactgtgagcatttgaagcatgtgcttgaagaaggtaaagagaattgatttgtatgatccggtaccaagggagagcagaacccttggtatttttttatgtattcaccacatatctaagaggccccgttaataagattttatgatggtttgactaacgaataatgggggttaaatatgtttatccatatcgtcgggcctggtgattctttgttttcgataggcagaagatacggtgcttctgttgatcaaatacggggtgtgaatggtttagatgaaacgaatatcgtgccggggcaggctctgcttatccctctttatgtatatacagtccagccgagagatacgcttaccgccattgcagctaaagcgtttgtgccattagagcgactgcgagcggccaatccgggcatcagcccaaatgctttacaagcgggagcaaaaataacgattccttcgatctcaaattacattgcgggaacgttaagtttttatgtgctccgaaacccagacctcgatcgggaattaatcaatgattatgcgccatactcgtcttcgatttcaattttcgaataccatattgcaccgaacggcgacattgcaaaccaattgaatgatgcggccgctattgagacaacttggcaaagacgagtcacgccgctggcaacaataacgaaccttacatcaggaggcttcagtacggagattgttcaccaagtgctaaacaatccgacagcgagaaccaatctggtcaacaacatttatgacttagtttccacaaggggatatggcggtgtcacaatcgattttgagcaggtgagcgccgcggatcgcgatcttttcactggatttttacgccagctgagagatcgacttcaggcgggagggtatgtgctgacgatagctgttcctgcaaaaacaagtgataatatcccatggctgaggggctacgattacggggggataggagcggttgtcaattatatgtttatcatggcttatgattggcatcatgcgggaagtgagccgggtcctgtagcgccgattactgaaataaggagaaccattgagtttacgattgcgcaggtgccgagcagaaaaatcattatcggagtcccgctctacgggtacgactggatcatcccgtaccagccgggcacagttgcttcagcgatttcaaatcaaaacgcaatcgaaagagcgatgaggtaccaagccccgatacaatattcagccgaatatcaatcaccgtttttccggtacagtgatcagcaggggcggacgcatgaggtatggtttgaggatgtcagaagcatgagccggaagatgcagatcgtccgtgaatacagattgcaggctattggcgcttggcagttaacgctgggctttacgccgggcccatggcttctgcggaaattttttacgatcagaaaagtgtaaaaaaagacaccagagcttgggtgtcttttttttgattaagtccagagcagcagaatagttcattcatttgtaccttgcatgggttgtgttcccattttacgattagtagtagtctgatcaaacaaagagtcagaatacgatttgagagggagttgtctacatgaagacagtattgattttgaattttcctgcggaaggccatgtgaatcctactttaggcattacgaaagcgttttccgataagggatatgatgtccattatatatccactgaaaaatataaaaaacgattagaagcagcgggagcaacggtccatcttcaccgggatctgctgcgaacgacacctattcatgtcggttcgcccaatggcattcttgatttcgtgaaaatccatatcaaaacgtcattggacattttacagattgtcaaagacttatctaagagcattcaatttgattttgtttattatgataaattcggcgcgggggaattggtgagggattacttagatattccaggggtctcttcatcggcgtctttcctgtttggcgaggagcatctgaaaatcctgccgctgcatccggagtctggagcgccgcttgaattggatcaagagtgcgaagaccttttggcaaaaatgaaagaaacgtacggtgttgccccgaaaaacctggttcaattcatgaacaataaaggggaattgaacgtagtgtatacaagccgttattttcagccagaaagtgatcgtttcggggatgaatgtctatttatcgggccgagctttccaaagagagcggaaaaaacagatttcccgattgaacagctaaaagatgagaaggtcatttatatttcaatggggactgtactggatcatacagaggatttcttcaacctttgtattgatgcattttcaggctttaacggaaaagtcgtcatcgctgccggagaaaaagcggacctgaccaaattaaagcaggcgccggaaaactttatcattgctccgtatgtccctcagctggaagtgctggagcaatcggatgttttcattacacacggcggaatgaacagcgtaaacgaaggcattcatttcagcgtgccactggttgtcatgcctcatgacaaggatcagccgatggtggcgcagcgtctctctgaactccatgcaggctatgtcatctctaaagatgaagtcaatgcccaaatattaaaacaggccgtagatgaggttttgcgcaacgatcagtatacggcaggcattaaaaaaatcaatcaaagcttcaaagaatgtatggacatggaagaagtgatggagcggattgatgagttgattcgccaaaaaaacaaataagaaaaagaactcccgtaccttgtacgggagttcttgatttaaaacttgattttgattttttgagcatcactgattttcttatggttatggtcaaagacgtcacttgtcgtgatttcgatccacttgatctcttttgttttcttctcagcatccgcggccttatcatgagcatggccgcttgatgcgttcacaataaagccgagatttccggacttttcggcgccgccttccaattcgccgtttaactcttcaagataaatatctttgttccaatcaaaggtttcacccgtatttgttttcatcaatgcaatcggcgcaacatttactttttttgtagaggtgttcttgatatcaacgaaaaccttaacgaaatcaaactcttcatcgtgtgttaactcatgaaagtaatcaatcatgctgtagtccgggcgcaagtggatcagcttcatttcttttactgttaactccacgtcgccaattttataggttttgttcacttgtttgatatcttttaagacagcttttcctttatcatctgaaaacgtttggccgaccttatgcaatgtccggtcatcagttacctgggaattaggctgataatcatctgtgctgtccttctgggatgaagtgctttgcggctcagcttttactgttttctccccgcctgcatgctgtttttcagtactggcgtttgatgagcagcccgcaagcatgatagcaaaaacgagaattgaaagaattcttctcatgatgattcctccattaaaaagagatcccgttacttcatacaagcaacgggacaccttgtattcttttacttatcgttaatcttaatgttgtattgtaaagccttgaaaacatttttggcgatttctgtattgtcgatttggccggcaaatgtctcactagacggaccgtatgcatagacgggaacatcttcaccggtatgtccgcctgttgtccatccagtgtgagagcgtttattaaagatgttctcgattgcgttatcgatatccagtacttccttcgattttgccgcttcttcaacagattgaatttcggcttttgttaaagccaatttcttttgatcgatatatgttttcaacgttttttcaacatccgcgccgtcagcgatcttttctgccataaagtctggtgtgcgctttgcggctttaatgggttcactgaaccagttgtagatgccgtccgcaccgatggaatatccgccggttgagtggtcagccgttgcgacaaccaatgtgtgcttgtcttttttagcgaaatcaatagccgccttataagcttgttcgaagtcttccatctcgctcatggcgccaacgatatcattgtcatggcccgcccagtcaatctggctgccttccaccatgaggaagaatccgtctttatccttgtttaattttttaatggctgtgtttgtcatatctttaagtgatggaatatccttcgtacggtcaatctttttaggcaggccgccgtcagcgaataggccgagaacttggctgtctttgtttttcagcatgtccttgcgatcatccacgtagctgtaccccgcctttttgaattccttaatcaaattacggtccttacggtcaaaattgctctttcctccgcctagaaggacatcaattttgtgcttgccgttgaccatctcatcaaaataatcatccgcaattgagttcatattttttcggctgtggtcgtgtgaaccaaaagaggccggagtggcgtgtgtaatttctgaagtggccacaagtcctgttgcttttcctttttctttcgcagcttcaagcaccgttttggcttctgacccgtcgttatcaacggctatggcattattgtatgttttaattcccgcagacatagccgttgccgccgctgcagaatccgttacattttgttcaggatcatcggggtaagttgtttgctggccgacaagatactgatcaaaagccgtaggctccacaacttttgtctttttattatcctttaagtatcgataagcagacgtataagacacacccataccatcaccaatcagaacaataacatttttaatttcgtcttggttcccctttttcttttcctgggcgctggcttcaggcacactgccgctggctaagctgctgaacgcaattgatgataaaaccgcgataggcagtaatttcttcgggaattttttcaactggataacctcctaaatatagatgaatctcaatgacaacccaattatatttttaaactgttaagctagtattaatcgattttaaagattggatttacaagaataatgaactggcacccttaaataatggttattcttttatgagaagttttagaaggaaagagcgatagtactaaagaaataaattggaggaatagatactggccgtggataggcggactgaaatctgctatagtcgcatagaagcaacccgcttacatcttgaacaatttaaagtattacgttggaaagaggtattgtgtaagcacatgtctgagcagttcatatggagtggcatcattttattttaggagggaacaacatggacgttttttctgagtacttagcggggattgctgacccgttccaccgagaaagaacggaagaggtgttaacttggataaaaaataaatatccaaatttacatacagaaataaaatggaatcagccgatgtttacggatcacggtacatttattattggctttagtgtttctaaaaagcatttagctgtcgctcctgaaaaagtaacgatagcgcacgtagaggatgatattgtgaaggccggatatgattacaccgagcagctgatacgtatcccttggaacggtccagttgattatacgctacttgagaaaatgattgagtttaatattctggacaaggcggactgctccactttttggcggaaatgaagaaaaaggcataacatatgagctgtataaaatatgttacgccttttcatttgtctatttttcgttttgatcatctattgctgcttttcatcaaacaaggtcttttcattgagcgtaagctgactcgcagaataatgattaccttgtttccatttcacttcaatcgtaatatcatggccttcaagctcatgttcatctaaccgctctaaaaaagaaacggacttttcttttgcgcttccatcagaaaaagtgcctccagcataatcatgcatcgggatttccgtgtcagaactcagcagaacttcatcatccttttttacaatcagtgattccagataagtgttgtctatttcaattgtatcaccgatccaataaagtttgccgctgtattcattcggtgcatcttcattttttgtgaaaacagcttcccaattctgatctttgctttctccctgccaatttggatactccaaacgaacatgatgaatcaggtgataggaaaaaaagatcaagcagaaagcgattaataggaatgccgtgaaaatgagagggtatttataatgactggacataaaagactcctattcgtttaatcaattaccttcgaaaatagaatttcatcccgaatcaaaatgccgttttcagccacctcgggaatctccggcttgagtcggcgcgctttttcaactgcgttcggaaacactgcggcgaattgatagcctctcttttgataaaacgctatcgcatttacattatcattcgttgtgataagctttattcgttgacaatgtgcatgtttagccttctcttcaacctgctgaagtaaagctgtgccgattcctttattttcaatcatactatctaatgaaataatttcacaatctttcccatctattgtgtatgtaatacagccaatgatttcgccgctttcatttactgcggcaaatccatctaattcatcacaccgaaaaatgccgctggaaatcgccatctcgggtgtaccccaatgcttggcaaaaaaatcggtcaacatatgtttcgctatctcattgtttgggatgatgatcatcataacactcctctattgaaagattgcatatgtactatcaatataaacaatatataacaaaaaaaatagatgttgaggtgacggcatggaaatcagcgatatcatttacgggcagcaccatatagacggagtgctggaagagcttatcaaaagcgctcctgtgcaaagattaaaaggaatctatcaaggcggagcaagctttttagtcaatcgaaagtggaatgtgaccaggtatgagcactccatcggcgtgatgctcctcatcaaaaagctcggaggaacgatagaagaacagattgcgggtctgctccacgacgtatcacacacagctttttctcatgtggtcgacgttgtctttgaaaatcaagcagaagactatcatgaaaacatctttcaacaagtcattgttcactctgaaatcccggacattttacaaaaacacggctatcatactgaagaacttttatctgacgattcaaggtggacattgctcgaacagcccgcaccggagctgtgtgctgatcggacagactatacgctgcgtgatatgtaccgatatggacacattaacctgcacgaagcgcaaacctttttggatcatcttattgtgagaaacggaaggatgtttcctgatagtattgaagccgccgaatggtttgtcagtgtgtactacaaggaagtaattgatttctttttgaatcctgtgaatgtatatggatatgaatatttagcgcgagcattgaaggcagcgctgcggcatgatgtcatatctgcagaggatctgctgaaaacggaccaagaggtactgaacatcctgcgtgcatcaaaaaatgaagaagtcctgagcttgcttacatccattcatcccggcatacaagtaatagaggatgacatccagtacgatttccatcaaaagaagaaaatgcgcctaatcgatccatccatttttcttgatgacaaatggatcaaatcctcaggtgtttctgaaaaggtgaggaaaatgggtgaggccgcttatcaaaaagcaaaaaaaggtgtgtatataaaaatcttaaagcagtaattgccgcctgacagcggctttttttatgtttggctttgcaaacaaaggggaataggacaaactgcgggaacgctttatgagaatatcagcgtatttacataccgttcgggggtatagtattatcgagagggcatgttttcattgtctgcgggcaaaagttacaggaaaaaaatgaagcaaaggagaatgaacatgaaaatctctaaatatgcactgggaattctgatgttatctctagtttttgttttatcagcatgcggcaataacaacagtacgaaagaaagcacacatgacaatcattcagactcctcaacacatgaagagatggaccattccggatcagctgacgttccagagggattacaggaatctaaaaatccgaaatacaaagtaggcagccaagtaatcatcaatacttctcatatgaaaggcatgaaaggtgctgaagctacggtaacaggcgcctatgatacaacggcgtatgttgtttcttatactccgactaatgggggacagcgtgtggatcatcacaaatgggtgatccaagaagaaatcaaagatgccggagataaaacgttacaacccggagatcaggtgattttagaggcttctcatatgaaaggcatgaaaggagcaacagccgagatcgattccgcggaaaaaacaactgtatacatggttgactacacatcgacaacgagcggcgaaaaagtgaaaaaccacaaatgggtcacagaagatgagctttcagctaaataataaaaaatcctccttttacaaggaggatttttttgctgtttgaacaggtcttgttaaagaaatgaaagcaaacaggacagcgatgatcacaatcgatccgccgcaccatgccgttgacaccacagtacccgtctgatccaaaacaacaccgccaatggctgagccaagggcaattccgacttggagggccgatgtgttaaagctttgctgaatgtcagacgaatcaggtgcaatttcaattaaatagctttgctgagccggggcgaggctccagctcagaagaccccaaatcaccatgacaggcaaaaagaaaatcatagacgatgtagacagcggcagtaagaacataatgatggcaaaggaaccggtcaccagcaaaatgctcttaaaggaaccaagccggtcagatagcgctcctccgaaagggcctccgcatacagcagatatcccgaaaaggaaataacaaatgctgacccagaaagagctcaggtgaagagtctcttctaaaaacggcgcaaagtaagcgtaaagcgtgtagtggccagctaatgtaaacatcgtgacgaggtgtgaactcgcgattttcagattaccgatcgtcttgagttgttcccggaaaggaatcattttctccgccggtattctttcaaagaagattgaaataatcagcatggagatcagtgccaacaggccgatgccaaggaacaaaatccgccacccgaaggaatcgctgattaagattccgagcggcacgcctaatgcgatagcagagctgaatcccataaaaataattccgattgcgcgggctctgtattcaggcgctacaattttcggggcaattgttaaagaaagcacaacaatcagccctgtactcattgctgccaataccctagataccatcagtgttgcgaaattagggctgaaataggcgacaagattgctaaggaagaaaacaaataaagcaattagatataagcgcttccgctcaatcttcgcagtcaatgccaaaagcagcggcccagatactgcatatcccagcgcaaacacactgatcagctgtccggctgaaacaatggaaatgtctaaatcatttgcgatctgaggaagaattccccccacaattaactcaaccaatccgactgcaatcgtagaagctgcaagcaggaaaactttgaaattcataacaaactcctttacttaaatgttttgataaataaaaaaaatcctgattacaaaaaatgtcataaacaaattttgtaatcaggattttacggttcctggtagacaccctcaaaccatattattgaggttatacaagtgataatagctatttaattgattcgtttccgttgatgagtgtaccacattatgaatgaatcttccatagaaaaatttataaaacggtgaaccggaaaaaaatatgattatatttattttataaaagtatagacatttaaaattaaatgactataataatcaatgtaagcgttttaataacaggggggatagcagttgaaaaaaatattactcgcgtgcagttcaggaatgtctaccagtttattggtgacaaaaatgaaggaatacgcacagtctatcggtgaggaagcggagatttgggctgttggccaggataaagcaaaagaagacatgagaaaagcggatgccgttttgatcggtccgcaaatgagctttctgaaaagcgagctccaaaaagaagcagatcaatacaacattcaagttgaagtcattgacatgatggcctacggaatggcagatgggaaaaaagcgtatgagcaggcattgtccttaatggtgaatcaataatggaacagatgaaaatcacgaatttaacagacgagcaaatcagttttcagctaatcctgcacagcggaaatgcccgcagctgcatcatacaatcactgcgcgcctataaagaagggaaaaaggacgaggctgatgccctcattgccaaggcggagcaggatttatccgcggcccatgacattcactttcaaatgatacagaaggaatccggcggagaagcaacagctttttcattgctgcttatgcatgcagaggatcatctgatgtcaacattatccatgaaagaattagtgaaagagatgcttgatctctttaaaaccaagaatatataaaaaatcggggtggatagggtgttcgagaaaatcagccaattccttgttccaattgcagggaggttaaacaataaccgctatttgcaagtgttgcgtgatgcatttatgctggctttcccgctgacgatattcgggtccatttttgtcgtgttaacgaatttgccgtttctaaacaaaatcatgaacgcctcaatgcttacgtcgtttcagtctcatttcggcattgcctccacggcgacaatgggcattatgtctgtctttgttgtgttcgggataggctattacctgtcgaaaagctatcaggtcgaagctgtatttggcggagcgatcgctttggtttcctttttgctcttaacgccatttatcattcagccggaaacaggtgatgccattacaggggttatcccggtcgatcgtctcggtgcaaaagggatgtttcttgggatgattacggcatttctttctggcgaaatttacagaagaatcgttcaaaaaaacctgacaatcaaaatgccagccggcgttccgcctgctgtagcaaaatcattcgccgcacttattccggcttttatcacattgactgtatttttgctgattaacgtaatggtgactctgttttttaaaacaaatatgcacgacgtcatttatcatgcgattcaggctccgcttgtcggacttggaagcggtatcattccaacactgattgccgtgtttttcattcaaattctttggtttttcggactgcatggacagatcattatcaactccgtgatggacccgatttggaatacactgcaggtagaaaacctttctgcttacacggcgggaaaagaaatccctcatattatttcaaaaccgtttatggagatttatacagtagggatgggcggaacagggatgacgcttgcgattgtgtttaccattctcatattcatgaaaagcaggcagatgaagcaagtatcaaaacttggcctcgctcccggtatttttaacgtaaacgaaccgattatctttgggcttccgattgtcatgaatccgatcattattgtgccttgggtgctggcaccgatggttgttacgctcgtcacctatctggctatgtcagccgggctcgttccgcctccaactggtgtgacagtgccgtggacggttccattattcattaatggcatcatggcgacgaactcaatcatggggggcgtgatgcagcttatcaatctgctgattgtcttcgtgatctggtttccgttcctaaaagcaatggataaattaaatctggcaaaagaaaaagaacaggctgtgcaggagacagctgctcagcaaaatgataacagcataaaaatgtgacataaggggagagagacttggcacatacagaacaatatcgttttccaaaggatttttggtggggatcatccgcttcagcaacacaaatggagggtgccgccgacagagacggaaaaggccagaatatatgggattattggtttgaaaaagaaccgcatcgtttttttgatcatgtcggacccgcagacacatcccaattttacgacaactataaagaagatatcaggctgatgaaggaacttggccacaactcgttccggatgtcgatttcctggtcacgtttaataccaaacggaacgggcgagatcaacgataaagccgcagatttctataacaatgtcattgatgagctgatcgctaacggaattgaaccttttgtcaatttgtttcatttcgatatgccgatggcgcttcaaaaaatcggcggctgggtcaacagagagacggttgacgcgtatgaaaactatgcaagaacttgcttccgtttgtttggcggccgggtgaaaaaatggttcacgcataatgaaccaatcgttcccgtagaaggcggatacctatatgattttcattatccaaacaaggtcgattttaaagaggccgtccaggttggatttcatacgatgctatcaagtgcccgcgccattcaggcttacagggagatgaagcaggacggaaaaatcggcatcatcttaaatttgaccccttcatacccgagaagcagccatccggcggatgtgaaagccggggaaatcgcagacgcgttttttaacagatcttttttagacccatctgtcaaaggcgaatttcccaaagagctggttgacattttgaagcatgaaggctttatgcctgattacaacgctgaagatctcgacatcatcaaaaagaacacggttgacctgttgggagtgaattattaccagccgagacgtgtgaaagcgaaagaacatcttccgaatcccgacgctccttttttgccggacaggtattttgatccctacgtcatgccgggccgcaaaatgaatccgcatcgcggctgggagatctatgaaaaaggcgtttatgatattttgatcaatttaaaagaaaactacggcaacatcgagtgttttatctctgaaaacggtatgggggttgaaggtgaagagcgattcagggatgaacaaggcatcattcaggatgattaccggattgaatttataaaagagcacctcaaatggattcaccgcgccatacaggaaggctcgaacgtaaaaggctatcacttatggacgttcatggacaactggtcttggacaaatgcctataaaaaccgatacggatttgtatcagtcaatcttgagaaagacggagaaagaaccgtcaaaaagagcggaaaatggttcaaagaggttgctgagcatagcggtttctagattttcctaaaggtcaagatcttccggcaatcatcataacgaatagagatgacgaaaatccgcaacattgatgaaatagggaaaagaacttatgatatccgtaaaagcttatgtgatatcaaacagctgccggaggataccaatgaataaatacgaaatcattgcaaatgaaatgagaaatagaattaaaaataacgtatatccgatcgatcagcccattcctgatgaagtatctcttgcaaaagaatttaactcaagccgcatgacgatgaagagagccttggataatttagttgccgagggtctgctgtttagaaaacgaggccatggcacgtttattattcaatctgcaatacaggatgaccatgtccatgtagtcagcaatgagattctcggattgaccaacttgctgaaagataaaaaaatcaaaagcaaggtcattcagtttgaagtgcaatttcccactgaggaagtggccgcccatttgtctattgatcagaaaacaccggtttattatgtcgttcggctgcgaattgtagaaggtgaaccctatgtattagaaaaaacatatatgccgactcatttaataccgggcattaatgacgatgtccttcatgattcgatctacaatcatattacaaatgtgctgcagctcaaaatcgccggaacgcatcggaaaatcagagcctgcaaatctgatcatattgaccagcagcatctgggctgtaaacaggatgatccaattcttgaagtggaacatgtgggcttcttagataccgggattccatttgaatattccttttcacgtcatcggcatgacaagtttgttgtgacttctgtaaacatacggcgctgattgcggagacaacaaggaggccatctgcatgcttggcggtattgaagcaggcggcacaaagtttgtttgtgctgtcggtagagaagatggaacgatcattgacaggatagaattccccacaaagatgccggatgaaacgatagagaaagtaattcaatattttagccaattttcattacaggcaatcggcatcggctcctttggtcccgttgataacgataaaaccagtcaaacatacggtaccattacggccacgccgaaagcgggctggagacactatccctttttgcaaaccgttaagaacgaaatgaagatcccagtcggatttagtacagatgtcaacgctgcggcgctgggtgaattccttttcggtgaagcgaagggtcttgacagctgcctgtatataacgattggcactggcatcggagcgggggctattgtagaggggaggctccttcaggggctgtcacacccagagatgggccatatttatatccggaggcacccggatgacgtataccaagggaagtgcccttatcatggagattgctttgaaggcttagcttcaggccccgctatcgaagcccgctgggggaaaaaagccgcggatttatcagatatagcacaagtctgggaactggaagggtactatattgcccaagcactggctcagtatattttgatccttgcacctaaaaaaatcattcttggcggcggcgtcatgcaacagaaacaagtgttttcttatatctatcaatatgtaccaaaaatcatgaacagctacttagatttttctgaattatcagatgatataagtgattatattgtacctccacgtttaggcagtaacgccggaatcatcggcacgctagttttagcgcatcaggccttacaagcagaggcagcatccggggaggtgcgatcatgacgcatccattatttttagagcctgtctttaaagaaagactatggggagggacgaagcttcgtgacgcttttggctacgcaataccctcacaaaaaacaggtgagtgctgggccgtttctgcacatgcccatggctcgtcgtctgtaaaaaatggcccgctggcaggaaagacacttgatcaagtatggaaagatcatccagagatattcgggtttccggatggtaaggtgtttccgctgctggtaaagctgctggacgccaatatggatctctccgtgcaagtccatcctgatgatgattatgcaaaactgcacgaaaatggcgaccttggtaaaacggagtgctggtatatcattgattgcaaagatgacgccgaactaattttgggacatcatgcaagcacaaaggaagagttcaaacaacgaatagaaagcggtgattggaacgggctgctgaggcgaatcaaaatcaagccaggagatttcttttatgtgccaagcggtacactccatgctttatgtaagggaacccttgtccttgaaatccagcaaaactctgatacaacatatcgcgtatacgattatgaccgctgtaatgaccagggccaaaaaagaactcttcatatagaaaaagccatggaagtcataacgataccgcatatcgataaagtgcatacaccggaagtaaaagaagttggtaacgctgagatcattgtttatgtgcaatcagattatttctcagtgtacaaatggaagattagcggccgagctgcttttccttcatatcaaacctatttgctggggagtgttctgagcggatcaggacgaatcataaataatggtattcagtatgaatgcaatgcaggctcacactttattctgcctgcgcattttggagaatttacaatagaaggaacatgtgaattcatgatatctcatccttaatgaatgggggagttgcatttgtttaagaaacatacgatctctttgctcattatatttttacttgcgtctgctgttttagcaaaaccaattgaagcgcatactgtgtcgcctgtgaatcctaatgcccagcagacaacaaaaacagtgatgaactggcttgcgcacctgccgaaccgaacggaaaacagagtcctttccggagcgttcggaggttacagccatgacacattttctatggctgaggctgatagaatccgaagcgccaccgggcaatcgcctgctatttatggctgcgattatgccagaggatggcttgaaacagcaaatattgaagattcaatagatgtaagctgcaacggcgatttaatgtcgtattggaaaaatggcggaattccgcaaatcagtttgcacctggcgaaccctgcttttcagtcagggcattttaaaacaccgattacaaatgatcagtataaaaaaatactagattcttcaacagtagaaggaaagcggctaaatgccatgctcagcaaaattgctgacggacttcaagagttggagaaccaaggtgtgcctgttctgttcaggccgctgcatgaaatgaacggcgaatggttttggtggggactcacatcatataaccaaaaggataatgaaagaatctctctatataaacagctctacaagaaaatctatcattatatgaccgacacaagaggacttgatcatttgatttgggtttactctcccgacgccaaccgagattttaaaactgatttttacccgggcgcgtcttacgtggatattgtcggattagatgcgtattttcaagatgcctactcgatcaatggatacgatcagctaacagcgcttaataaaccatttgcttttacagaagtcggcccgcaaacagcaaacggcagcttcgattacagcctgttcatcaatgcaataaaacaaaaatatcctaaaaccatttactttctggcatggaatgatgaatggagcgcagcagtaaacaagggtgcttcagctttatatcatgacagctggacactcaacaagggagaaatatggaatggtgattctttaacgccaatcgttgagtgaatccgtaatgtcacaattaagaaggtgctcaagaagtttcttgagcaccttcccactggattaagcattcatatcgcctaacccaggactgtgttcatttggtatttcaggaagcactggtacgggaaaccctgccggaggatctattacttgtaactctccgccatttcggcttggagatttcccttgatagatttcactgattctcgtttcatccaacctaaagttaaaatgtgtattatggtagcctaattcgacatactttctgcactcaggatatttattaatgtcataattcggcacagggagcagcttcgcccattcaacgcccaatgtctcgagcgctttcgcgaatgcattctggtgagcattgtcgcgtacaatcagaaaagcaagtgtttcgcggaacgtctgattagagctcatttcataaattcttgttttttgcagcacacctgtcgactcaagaagcaggttatccagcaggtcagtaattaagtttccgtggttatacacccacgacccgttccacggattgccccctgcatcaacaggaagggaactttgcgctccaataatataatgatgaggattagcatgtttaaccgcttcatcaagtggcgcttgatctgtaccttgactgccgacaccttcaccgcctgattcatctaataaagcattgattgtgttttgaaccagttcaacgtgggcaatctcctctaaaaaaatgccgcgaagcagatcgcggtactgtttctgctttcctctgaaattagagctttggaaaaaaactgcatcattgtacgcatttctccgtaatgaccgcctaatatctcctgcaggaccttagcagctgccgggtctggcttgtccggtttaatgatattaatcagttcctctttgtagtaatacataacacgcctcatttcttcttaagagattttcttatattatttgtaagatgagataaaatatatacatgataagcatgggaaggcgtgaaagaagaaaataaaaaaatacaggaaaagtgttgaccaaataaaacaggcatggtatattattaaacgtcgctgatgaacagcgtgaaacaaaacagaaaaacaaaaaagttttcctaaggtgtttacaagattttaaaaatgtgtataataagaaaagtcgaattgaaaaagattcgaaaaaacattaaaaaacttcttgacttcaacatcaaatgatagtatgatagttaagtcgctcaataagcgcccgtagctcaattggatagagcgtttgactacggatcaaaaggttaggggttcgactcctctcgggcgcgccatataagataccacgcgggtgtagtttagtggtaaaacctcagccttccaagctgatgtcgtgagttcgattctcatcacccgctccattattgaatgatctttgaaaactaaacaagacaaaacgtacctgttaattcagtttttgaaaatcgcacagcgatgtgcgtagtcagtcaaactagggcctgcacgatgcaggtcacacaggtgtcaccgcgggatgcggtggacttaacctgtgatccatttatcggagagtttgatcctggctcaggacgaacgctggcggcgtgcctaatacatgcaagtcgagcgaacagatgggagcttgctccctgatgttagcggcggacgggtgagtaacacgtgggtaacctgcctgtaagactgggataactccgggaaaccggggctaataccggatggttgtttgaaccgcatggttcaaacataaaaggtggcttcggctaccacttacagatggacccgcggcgcattagctagttggtgaggtaatggctcaccaaggcaacgatgcgtagccgacctgagagggtgatcggccacactgggactgagacacggcccagactcctacgggaggcagcagtagggaatcttccgcaatggacgaaagtctgacggagcaacgccgcgtgagtgatgaaggttttcggatcgtaaagctctgttgttagggaagaacaagtaccgttcgaatagggcggtaccttgacggtacctaaccagaaagccacggctaactacgtgccagcagccgcggtaatacgtaggtggcaagcgttgtccggaattattgggcgtaaagggctcgcaggcggtttcttaagtctgatgtgaaagcccccggctcaaccggggagggtcattggaaactgggaaacttgagtgcagaagaggagagtggaattccacgtgtagcggtgaaatgcgtagagatgtggaggaacaccagtggcgaaggcgactctctggtctgtaactgacgctgaggagcgaaagcgtggggagcgaacaggattagataccctggtagtccacgccgtaaacgatgagtgctaagtgttagggggtttccgccccttagtgctgcagctaacgcattaagcactccgcctggggagtacggtcgcaagactgaaactcaaaggaattgacgggggcccgcacaagcggtggagcatgtggtttaattcgaagcaacgcgaagaaccttaccaggtcttgacatcctctgacaatcctagagataggacgtccccttcgggggcagagtgacaggtggtgcatggttgtcgtcagctcgtgtcgtgagatgttgggttaagtcccgcaacgagcgcaacccttgatcttagttgccagcattcagttgggcactctaaggtgactgccggtgacaaaccggaggaaggtggggatgacgtcaaatcatcatgccccttatgacctgggctacacacgtgctacaatggacagaacaaagggcagcgaaaccgcgaggttaagccaatcccacaaatctgttctcagttcggatcgcagtctgcaactcgactgcgtgaagctggaatcgctagtaatcgcggatcagcatgccgcggtgaatacgttcccgggccttgtacacaccgcccgtcacaccacgagagtttgtaacacccgaagtcggtgaggtaaccttttaggagccagccgccgaaggtgggacagatgattggggtgaagtcgtaacaaggtagccgtatcggaaggtgcggctggatcacctcctttctaaggatattatacggaatataagaccttgggtcttataaacagaacgttccctgtcttgtttagttttgaaggatcattccttcgaaacgtgttctttgaaaactagataacagtagacatcacattcaattagtaatacaagatatcacatagtgattctttttaacggttaagttagaaagggcgcacggtggatgccttggcactaggagccgatgaaggacgggacgaacaccgatatgcttcggggagctgtaagcaagctttgatccggagatttccgaatggggaaacccaccactcgtaatggagtggtatccatatctgaattcataggatatgagaaggcagacccggggaactgaaacatctaagtacccggaggaagagaaagcaaatgcgattccctgagtagcggcgagcgaaacgggattagcccaaaccaagaggcttgcctcttggggttgtaggacactctgtacggagttacaaaggaacgaggtagatgaagaggtctggaaaggcccgccataggaggtaacagccctgtagtcaaaacttcgttctctcctgagtggatcctgagtacggcggaacacgtgaaattccgtcggaatccgggaggaccatctcccaaggctaaatactccctagtgaccgatagtgaaccagtaccgtgagggaaaggtgaaaagcaccccggaaggggagtgaaagagatcctgaaaccgtgtgcctacaagtagtcagagcccgttaacgggtgatggcgtgccttttgtagaatgaaccggcgagttacgatcccgtgcaaggttaagcagaagatgcggagccgcagcgaaagcgagtctgaatagggcgcatgagtacgtggtcgtagacccgaaaccaggtgatctacccatgtccagggtgaagttcaggtaacactgaatggaggcccgaacccacgcacgttgaaaagtgcggggatgaggtgtgggtaggggtgaaatgccaatcgaacctggagatagctggttctctccgaaatagctttagggctagcctcaaggtaagagtcttggaggtagagcactgattggactaggggcccctaccgggttaccgaattcagtcaaactccgaatgccaatgacttatccttgggagtcagactgcgagtgataagatccgtagtcgaaagggaaacagcccagaccgccagctaaggtcccaaagtatacgttaagtggaaaaggatgtggagttgcttagacaaccaggatgttggcttagaagcagccaccatttaaagagtgcgtaatagctcactggtcgagtgactctgcgccgaaaatgtaccggggctaaacgtatcaccgaagctgcggactgttcttcgaacagtggtaggagagcgttctaagggctgtgaagccagaccggaaggactggtggagcgcttagaagtgagaatgccggtatgagtagcgaaagaggggtgagaatcccctccaccgaatgcctaaggtttcctgaggaaggctcgtccgctcagggttagtcgggacctaagccgaggccgaaaggcgtaggcgatggacaacaggttgatattcctgtaccacctcctcaccatttgagcaatggggggacgcaggaggatagggtaagcgcggtattggatatccgcgtccaagcagttaggctgggaaataggcaaatccgtttcccataaggctgagctgtgatggcgagcgaaatatagtagcgaagttcctgattccacactgccaagaaaagcctctagcgaggtgagaggtgcccgtaccgcaaaccgacacaggtaggcgaggagagaatcctaaggtgatcgagagaactctcgttaaggaactcggcaaaatgaccccgtaacttcgggagaaggggtgctctgttagggtgcaagcccgagagagccgcagtgaataggcccaggcgactgtttagcaaaaacacaggtctctgcgaagccgtaaggcgaagtataggggctgacgcctgcccggtgctggaaggttaagaggagcgcttagcgtaagcgaaggtgcgaattgaagccccagtaaacggcggccgtaactataacggtcctaaggtagcgaaattccttgtcgggtaagttccgacccgcacgaaaggcgcaacgatctgggcactgtctcaacgagagactcggtgaaattatagtacctgtgaagatgcaggttacccgcgacaggacggaaagaccccgtggagctttactgcagcctgatattgaatgttggtacagcttgtacaggataggtaggagccttggaaaccggagcgccagcttcggtggaggcatcggtgggatactaccctggctgtattgaccttctaacccgccgcccttatcgggcggggagacagtgtcaggtgggcagtttgactggggcggtcgcctcctaaaaggtaacggaggcgcccaaaggttccctcagaatggttggaaatcattcgcagagtgtaaaggcacaagggagcttgactgcgagacctacaagtcgagcagggacgaaagtcgggcttagtgatccggtggttccgcatggaagggccatcgctcaacggataaaagctaccccggggataacaggcttatctcccccaagagtccacatcgacggggaggtttggcacctcgatgtcggctcatcgcatcctggggctgtagtcggtcccaagggttgggctgttcgcccattaaagcggtacgcgagctgggttcagaacgtcgtgagacagttcggtccctatccgtcgcgggcgcaggaaatttgagaggagctgtccttagtacgagaggaccgggatggacgcaccgctggtgtaccagttgttctgccaagggcatcgctgggtagctatgtgcggacgggataagtgctgaaagcatctaagcatgaagcccccctcaagatgagatttcccattccgcaaggaagtaagatccctgaaagatgatcaggttgataggtctgaggtggaagtgtggcgacacatggagctgacagatactaatcgatcgaggacttaaccatatttttgaatgatgtcacacctgttatctagttttgagagaacactctcaatttgtttggtggcgatagcgaagaggtcacacccgttcccataccgaacacggaagttaagctcttcagcgccgatggtagtcgggggtttccccctgtgagagtaggacgccgccaagcattacttttatcatcgcggggtggagcagttcggtagctcgtcgggctcataacccgaaggtcgcaggttcaaatcctgcccccgcaaccaaatatatggttaaataaggagtgccctaagggtgcaaccaaaataatcctatacaaatatggtccggtagttcagttggttagaatgcctgcctgtcacgcaggaggtcgcgggttcgagtcccgtccggaccgccattaatgtaaacgaaacgatcatgttttcgttttttttgtgttttcttttactgtatcttctgcttggtgtcatagccaagctttctttatatcgggaacatcttggatattccagcaaaattcgataaactaggaagagcacaaataggcataagcagggttgaaaggaggttttggttcatggatgaatttgatttgatacatagcattactccgcggaccattcaccattcttccgttgatgtaggaataggtgatgatgcagcgctctacactgcgaaacacggcgttcaggaaattgtttgtgttgatactatggtagaagacgtgcacttcaaattacactattcctcacctgaagatatcgggtacaaggcgttagccgttaatataagtgatattgccgcgatgggaggcattcctaagttttatctggtatcacttgcggtaccttcaaaatggactgaatctgaaatcaaggcgatgtatgaaggaatgaatgaactggcgaaactatatcatatggatctgattggcggcgatacagtttctaccgctgacaaattagtcgttacagtcactgtaatcggtgaaattgaaaagggacaggcctgtttgcgcagcttggcaaaaccgaatgatattgtgtttgtaaccggtgaaatcggttcttctgcagcagggctttctttattgctggaagagactaatcctcaaaactcatctgtggaaacggattactttatccacaggcataaacggcctgagccaagagtaagcgtcggcagattatgctcgatttttaaacgggcagctttaaatgatgttagtgacggattggctagtgaactgaacgagattgcagaagccagctgtgtttcaattgaaattgttgaaagcatgcttccaattcattctgatttgcctaagcttcatcctaactggaaagaatgggctttgtttggcggtgaggattttgagctgacagggacggtttcaaatgaggagtgggaagtgttgaagcaggagtgcgcagcgcttcatcttcccattacaaagattggctatgtcagggaaaaaacaaaatctaaagtgatcctaaaaacagatcaaacatcaatgatcttagagaaaaagggatataatcattttaaataagacgggtgactcgtgtgaagcaattaaaatggagaactgtaaatccagaagaaacaaaagcaattgccaagctgacggcagcgtttgctaaaccgggagacgtcctgacattagagggcgatttaggtgcaggaaaaacgacttttacgaaaggttttgcagaagggctgggaattacacgtattgtaaacagtccgacttttacaattataaaagaatataacgatggcgtacttcctctttatcacatggatgtgtatagaatggaagatgaaagtgaagatttgggacttgatgaatattttcacggacaaggtgtctgtctcgttgaatgggctcatttaattgaagaacagctgccacaggagcgactgcaaattgtcatcaaaagagctggtgatgatgagcgggaaattacctttactgctgtcgggaatcggtatgaaatgctttgtgaggagttaagtagacatgacaatattagcaattgatacatcaaattatacattgggcattgcgctgcttcgagaagacactgttatagcagaatacattacatatttgaaaaagaaccactctgtaagagcgatgcctgctgttcattcattgctgaatgattgtgatatggcaccgcaggacctttctaaaattgtcgttgcaaaaggccctggttcatacacaggagtaagaataggtgtgacgttggccaaaacacttgcctggtctttagacattccaataagtgctgtatcaagtcttgagacgcttgcggcaaatggccggcattttgacggtctgatcagcccaatctttgatgctagacggggacaggtgtacacaggtctgtatcaatataaaaatgggcttttagagcaagttgttccagatcaaaatgtgatgctggcagattggctggagatgctaaaagaaaaggaccgccctgttttgtttttaggccatgatacttctcttcacaagcagatgatcgaggatgtgcttggaacaaaaggattcattggaactgccgcccagcataacccgcgcccttcagaattggcttttctcgggaaggaaaaggaagcagctgatgttcatgggcttgtcccggattacttgcggctggcagaagctgaagcgaaatggattgaaagtcaaaagtagggtgataggatgaaaacaaaagcagcggtcagaaatatgcggcttgaagatatagatcacgtatacgaaatcgaagcatcctcctttacgtctccttggacgaaggattcgttttatcatgagctgctggaaaatccgtatgctcattatctcgtgattgaaaaggacggccatcttgctgggtattgcgggatttggattgtgatggacgatgcccagattacaaatatagcgataaaaccagagtatcgcggccagtctttaggagaaacgctttttcgctcagctgttgaactgtgcaaagaaaaagacgcaaggcggctttcgcttgaagtgagggtttcgaatcatcctgctcaaggcttatataagaaattcgggatgcagcccggcggaataagaaagaactattatactgataacggggaagatgcgttaattatgtgggtgacgataaatgagtgagcaaaaagacatgtacgtattaggaattgaaacaagctgtgatgagactgctgcagctattgtgaaaaacgggaaagagatcatttcaaacgtagtagcctctcaaattgaaagccataagcgcttcggaggcgttgttccggaaattgcttcaagacatcatgttgaacaaatcactttggttatagaagaggcgtttcgcaaagctggcatgacgtatagtgatattgatgcgattgcagtaacagaaggtccgggactggtgggagcgcttcttatcggagtgaatgccgctaaagcattgagctttgcatataacattccgttagtaggcgttcatcatatagccggtcatatatacgcgaaccgtcttgtagaagacatcgtgttcccggcactggcattggtcgtttcaggaggccatacagaactggtttatatgaaggaacatggatcatttgaagtcattggggaaacccttgatgatgcggcaggagaagcctacgacaaagtggcgcggacgatgggattgccatatccgggtggaccgcaaattgacaagctagctgaaaaagggaatgacaatattccgcttcctcgcgcatggcttgaagaaggctcttacaacttcagctttagcggattgaagtctgcggtgatcaatacgcttcataatgcatcccaaaaagggcaagagattgctccggaagatttgtctgccagtttccaaaatagtgtgatcgatgtcttggtaaccaaaacggcgcgcgcggcaaaggaatatgatgtcaaacaggtccttttagccggaggagtagctgcaaacagaggcctcagagctgcattagaaaaggaatttgcccagcatgaagggattacgcttgtcattcctccattagctttatgcacggataatgctgcgatgattgctgctgctggtacaattgcttttgaaaaaggaattcgcggtgcatatgatatgaatggccagcccggccttgaattgacttcttatcaaagtctcacgagataatagcgtgagactttttatctgtttgttattaacagacaattcacaatttatccacatatctgtgagtaattatagagatattgatggataaagggctgaggtcactgttaataaagtggataaattcagaatattttgtggatagtgtgtataaagcgcttactttgtttatttattaggggatgttctgtggataaaaagcacctctaaaaagaggtgcttgacttttttaatcttcttctgtggatagttcttcccattcggacaaaagagattccagctcctgattaagcttctcattgtctgcatggatagcttgtactttttcatgatcctgatagacttcagggtcacatagcaattcatcattgcggctgatgttctcctcaatggtttgaacggtggtttcaatttcttcaatccgacggagtcgttggcgctctttctttttccattctttttcttcctcgtaggaacgtttggagtcagacttcactgtagctggcgttttatcagtttcctcttgctgattcattttctccaattcaagctgctctgtttttttctctgtataataatcgtaatctcccagatactcctctatatggcttgaagaaagctccaatactcttgtggcgattctgttaataaaatatctgtcatgtgagacaaataacagtgtgcctggataatcaatcagcgcgttttcgagaacttctttgctgtctaaatccagatggttcgtcggttcatcaaggatgagaaagttggctttttgaagcatcagcttagctagagccaatcttgctttttcgcctccgctcagtgaatgaactggtttcagcacatcatctccggagaataagaaatttccgagacacgttctgatttctttttctgggagcccggggtactcgtcccacagctcatcaaggacacgtttagaggaagtcaactcagcctgttcctggtcataatagccgacactgacatttgagccgtaagaaattgttccctgatctggttttagggtgtctattaatgttttcagcaatgtcgatttacctattccgttagggccgacaagcgcagcgctttctcctcttgtgagcatgaatgacacttctgttaaaagcggcggctggttttcatagctgattgtgagatcctgaacacgaaggacttcatttccgctctgttttgtaatatcaaaatgaaagtttgcggatttttcatcgccaagcggttttgacatgacatccattcgctcaagctgctttctgcggctttgcgcccttttggtggtagaggctctcgccagatttcgatctacgaagtcctgcagctttgcaatctcgtcctgctgcttttcatacattttcagatctttttcatactgcgcggctttttggtcgagataagcgctgtagttgccgtgatactttttgctttctgctcttgatacctcgtatacctggtttactactttgtccaaaaagtagcggtcatgcgaaacgatgagaatggcgcctgaatagccttgtaaataatgctcaagccaggtaagcgtatcaatatccagatggtttgtcggctcatcaagaatgagcaaatcaggctgtgttaatagaagcttacctaaagccagtcttgttttctggcctccgctgaggctttgaacctgtgtagaatcgtcaaaatggctgaagccgagaccatgcagcacagatctaacatccgcttcatattgataaccgcctttatctttgaattcctgctgaagacggtcgtaggttttcatgatgctttctaattcacccgggtcagctgccgccattttttcttccatagcccgcatttccttttccattgcttttaagtggtcaaaaacagtcagcagctcttcttttatggtaagcttagaatccaagccagtatgctgggcgagatatcccattgtaatatctttcggtttaataatttcgcccttttcatacgaaagctggcctgcgataattttaaggagcgtggattttccggcgccatttcttcctacaatggcgatgcgatcacgatttctgacttccagctttatattgtttaaaatagtatcagcaccaaatgatttggacagctgattaacttgtaagatcatcatattatttcacctctgctataataagttaagtgtagcttatgaaccagaagtcagcaaacaatacattggccatataagacatagagaagaaaatagtgtatgatctgtttaaggagcgttttaatatgaatggattttctcattttaatgaacagggcagagcccagatggtggatattagcgaaaaatcttcgactgtccgtactgcggcggctgtttcaagcgtacacatgaagaatgaagtgtacgagaaaatacaaagtcacgatatcggcaaaggagatgtactggctgtcgcacaggtggcaggcattatggccgcaaagcaaacgtcgaatatcattccgatgtgccatccgctttcattgagcggggtagatatatcgtttgactggaaaataaaagaagcagaagttatacttcatataaaagcacaggtcaaaacgaaagggagtacaggtgtggaaatggaagcgctcacttctgcatcggtgtgcgctcttaccgtttacgatatgtgcaaggcccttgataagggaatggtcatcggccctactttcttgctggagaagacaggcgggaaaaacggtgactttaaaagagaactatccgagtataatttggaggaccaaaaatgaataaggatcaatcaaaaattccgcaggcgacggcgaaacggctgccgctttactatcgctttttaaagaatctgcatgcgtcaggaaaacagcgtgtatcatccgctgaactcagtgatgccgtaaaggttgattctgccacgattcggagggatttttcctattttggagctcttggcaaaaaaggatacggatataatgtggattatttgctgtcttttttccggaaaacgcttgatcaggatgagatgacagacgtcatcttgattggtgtcgggaacttgggaacggcatttcttcactataatttcacaaaaaacaataacacaaaaatttctatggcttttgatataaatgagagtaaaataggaactgaggtaggcggcgtgcccgtctataaccttgatgaccttgaacaacacgtaaaagatgaatcagttgccattcttacagtgccagcagttgccgctcaatccattacagacagattggtcgcattaggaatcaagggaatccttaattttacgccggcccgtttgaatgtgccggaacacattcgaattcatcatatagatttagcagttgagcttcagtcactggtttattttttgaagcattattcagttttagaggaaatcgaatagagggaaaggaggagcccaaatatgccgatcggtcctggaagccttgctgttatcgcaatcgttgctctgattatcttcggtcccaaaaagctgcctgaattggggaaagcagcgggagacacacttcgtgaatttaaaaacgctactaaaggattaacgagtgatgaagaggaaaaaaagaaagaagatcagtaagttaggatgacacgaatgaaagtgaatcaaatgtcgctgctggagcatattgctgagcttcgaaaacggttgctgattgtagcgctggcgtttgtcgttttctttattgctggattttttttagcaaagccgattattgtgtatctgcaagaaacagatgaagcgaagcagcttacgcttaacgcgtttaacctgacagacccgctttatgtgtttatgcaatttgcgtttatcatcggcatagtcttgacctcgccggttattctttatcagctttgggcttttgtgagcccgggcctctatgagaaagagcgcaaagtaacgctcagctacattccggtctctattttgctgtttttagcgggcttatctttttcatattatattttatttccttttgttgttgattttatgaagcggatttctcaggacttgaatgtcaatcaggtgatcggaattaatgaatattttcattttcttctgcagctgacgattccgtttggactgctgttccaaatgccggtcatcctcatgtttttgacaaggctcggaattgtgacaccgatgttcttggcgaaaatcagaaagtatgcgtattttacgctgctggtgatcgcagccctgattacaccgcctgagcttctgtcccatatgatggtcacagtcccgcttttgattttatatgaaatcagtatccttatatcgaaggccgcttatcggaaagcacagaaaagcagtgctgccgatcgggacgtgtcttctgggcaataataaaaaatccatttctcatgcgagaaatggattttctttatttttggttctttttgattttaaatgaaaaggcgaacatcttaaaagaaatgctgatgttgtaagcggcgaacaccatcagcaggatggagtaaaatgaccacatgctgcctggcgagcttgcggcaagataagtaaagatgcaccctacggcaaagtagatcattccccaaactaccgggtttctcataaaaataatcctccaataatcaattgcatttgtgtgctctgctgttcaaggtaattacgaacaggctcaagctgcatgatgacgacgaatgtattcatcattaaatgggcgaaaatcggcacccatatccgttttgttctcgcatataaaaaggcaaaggtaaagcccattgctgtatatagaaggagatgcttcaaatcagcgtgaacaataccgaagataaccgagctgatcagtcctgcgaaaaagaaattcgttttttcgtacagcgcgccgaaaatgatttttctgaagatgatttcttctaatataggcccgacgatggaagaaacgataatcatgagcgggactgcctgaatgacatccagaatcgcttgtgtattttctgattctcttccgatgccaaaaacataatattcaatagagcctgctattccttgagagaaaagggcaatgaaaaaaccggctatcgcccaaaggatagaaagtccgattgagtccttctgtccgtttcgcagcgtttctttcggaacggttctcagaatgagcagaacaacaacgagacaggcgataaagctgataacggaccataatccttgtgcatgcagcatattttcatctgtaggctgtcctccggcataaccgaatttaaataacaagggaatcgcgattaatgcggaaaactgcatgatgatatatgtcaaaataataaaccaatactgttttctcaaatggtatgtactcctttgttaagtgggtttcgttcatctacagctattgtaacataatcggtacgggggtgaaaaagctaacggaaaagggagcggaaaagaatgatgtaagcgtgaaaaattttttatcttatcacttgaaattggaagggagattctttattataagaattgtgttagcactctttagtgctgagtgctaaaattacatattcatactattgaggaggttatttcattgttaaagccattaggtgatcgcgttgtcattgaactcgtagaatctgaagaaaaaactgccagcggaattgtgttgccggattctgcaaaagaaaaaccgcaagaaggcaaaatcgtggcagctggttcaggtcgcgtgttagaaagcggagagcgcgttgctttagaagtaaaagagggcgaccgcattatcttctcaaaatacgcaggtactgaagtgaaatacgaaggtactgaatacttaatcttacgtgaaagcgacattttagctgttatcggctaattcttaaataaacaatacttaaaacatttgaggaggtcttgtaaacatggcaaaagaaattaagtttagtgaagaagctcgccgcgcaatgcttcgcggtgtcgatgcacttgctgatgctgttaaagtaactttaggaccaaaaggacgcaacgtggttctagagaaaaaattcggttctccgttaatcacaaatgacggtgtaacaatcgctaaagaaatcgagctagaagacgcgtttgaaaacatgggtgctaagcttgttgctgaagtagccagcaaaacaaacgacgttgccggtgacggtacaacaactgcaacagttcttgcgcaagcaatgatccgtgaaggccttaaaaacgtaacagcaggcgctaaccctgtaggcgtgcgtaaagggatggaacaagctgtagcggttgcgatcgaaaacttaaaagaaatttctaagccaatcgaaggcaaagagtctatcgctcaggttgctgcgatctctgctgctgatgaggaagtcggaagccttatcgctgaagcaatggagcgcgtaggaaacgacggcgttatcacaatcgaagagtctaaaggcttcacaactgagcttgaagttgttgaaggtatgcaattcgaccgcggatatgcgtctccttacatggtaactgactctgataagatggaagcggttcttgacaatccttacatcttaatcacagacaaaaaaatcacaaacattcaagaaatccttcctgtgcttgagcaggttgttcagcaaggcaaaccattgcttctgatcgctgaggatgttgaaggcgaagcacttgctacacttgttgtgaacaaacttcgcggcacattcaacgcagtggctgttaaagctcctggtttcggtgatcgccgtaaagcaatgcttgaagacatcgctgtccttactggcggagaagtcatcacagaagatcttggccttgacctgaaatctactcaaatcgctcaattgggacgcgcttctaaagttgtcgttactaaagaaaacacaacaatcgttgaaggcgctggcgaaacagacaaaatttctgcccgtgtgactcaaatccgcgctcaagtggaagaaacaacttctgaattcgacagagaaaaattacaagagcgtcttgctaaacttgctggcggcgtagctgtcatcaaagtcggcgctgcgactgaaactgagctgaaagagcgtaaacttcgcatcgaagacgccttgaactcaactcgcgcagctgttgaagaaggcatcgtatccggtggtggtacagcgcttgtaaacgtatataacaaagtcgctgcagttgaagctgaaggcgatgctcaaacaggtatcaacatcgtgcttcgcgcgcttgaagagccaatccgtcaaatcgcacacaacgctggccttgaaggatctgtcatcgttgagcgcctcaaaaacgaagaaatcggcgtaggcttcaacgctgcaactggcgaatgggtaaacatgatcgaaaaaggtatcgttgacccaacaaaagttacacgctcagctcttcaaaacgctgcgtctgtagctgcaatgttcttaacaacagaagctgttgtcgctgacaagccagaagaaaacggtggcggcgcaggaatgcctgatatgggcggcatgggcggtatgggtggaatgatgtaataaagggatattaacccttatacatcaatgttttaaccgtcttaaaaaactagacaaagcgtgaataaaaaaagagaaggtctttcatcagtttactaaactgttgggagaccttttctccatattagcggtcatatgagcataaatgtccatcgtcgtatttatgtccgaatgaccaaattgttgctggatttctttaatgcctactcctgcctcaattagtaaggaggtatgggtatgcctaaaagagtggggggtgacattctttttatcccagcttttttgagcagccgtttaagtctagtctcaataacctttcttaattgcggatgaccatcctcccgctcaaaaataaatgatgagtcttgataaatcaatctatttttaagcttaatttcattttgataaattttatttttttttagtagattgacatcgtttcatcaattcgaacgatatcaacagatcctgttgttttaggtgttagcaattggtatttttcaatttgattgttaggggtgtatagggtctttgtgacctggcttatcattgaaatctgtccattttaaagcaagaagttcaccaattcttaggtcggtctaggcaagtacggtaaagaccaaatggtccatttctagcccgtcagattgagcgagctttagaaaatgtgtcagcacctctttttccaatgctttgttgcttcttgggtaattgaaaatccccagttgggttcattttaataatcccttgagttttagcttttcggaaaatcatacggccgcaggcatgaatacctcccaaacaattgtgactgtattgctcgttcagttctaacgtgcggtcttcatacatttttttgtgttttgctaatcgggtattgacccaatactgcgataaaatgcatcattttcttttcactggcccgtacactgcttatttttaccccactccggttgtaaatcttaagccaaccttttgcaaatgttttgaagggcatatctgactccttaataaaagtcccgttgtcgttttggagttctacgtgacgggctgctactggggcttctttctttgttttaaatcttcctttggatatttctagacgttttttggttaaagggtcaatgcctagtagatatgataactccacgtcttaccgcattgcttgagttttgccatttatttgtccctaactaattttttttcatcaaattggtctttaagtgagtttaataatttttgtttctctcgactggtcaataattgcccttcatatttcaaaagattggataaatttgagatggaatcaatcctgatggattctaaaagctttgtaaatttctaattttatcctggcctactgtgcaacagaccttcttaatcgagcctaattttccatctatttgattggggaacaaatggctttttaacaagaaagaagtccaagaatacattgattggtggtcaattgaggttaaaaggaaaaagagggcctgatatatctttcactttcgcctaactagcaaaatttaataaaacgataagcgatgtgaggtgaaaattatgctaagtgataataattttgtttccgaaacactggagaatgtacagtatctattgccaggtgcaaaagtaatcaaattgaggggatacagcagggcccacaaagtatacaccattgcaaaatccccggtagaaaagtggaaggtcgccgcaggtttatccggatcagagatagcaattctgattagaaaaggtcattggattggtgcaagcattccagctggcggaattgtcatcgatattgatgattcaaaacagggagagctagtgaaaggtttactagatgcgcaaaactttcattgtcattgtattaggaccctaatgggtggcagtttatttttaaggataaccaacatggggaaaagaaaattaaacaaataaccaaattttttactcaaataggtatcatagtcgatgctgggatcgctggggcaggctatattgttttcccaacaagtaacactgaggacgatatatagtaactaagagtcctaatgagttagatgaaatacctaattatctgaggcctgtacggaattctgttaatgtaaaggacaacaacactggtgaaaaatatgtattccctgtaccaatcgacagagttggtagcagaaatgatactttaaatttgctacacatttgaaagcctggaaggtggaaccatacgaaattagcaaggccatggaattgatttataaataccttctgctggataaaaaagatttctctttggaggaattttataaactcaccatatatgctatcaaatggaaactggaacaagctcagtttccattgtatttagaatccacaaaaaaatcgcatcaaaatgttattccccagccgtttaagataaaaggaaatgtcttatataaaacggtaatcaagaatagcggggactttgaagaatagctcatcatggcgtgtaggagtgattcacccttttaagaaactgtctaatatcgaaagaaacagtgttcattatgaactagcctcaaacgataacggacgcgaaaaaaaggatatagttcctgctagtgttatatcaccaagcgggagttgcttttcattggcggataatgggctagttgagaaggaagggcaaaaaatgaagctgacagagagacaacgacgcttttgtgatttctttacagaaactagaaatacaacagaggctacgcgtctagccggaaacaaagggaaaaatctcaacagagtagcttctcaaaacttgtcaaaactagacattcaaactatatagagcaaagaaataatcaactagaagcggagcgcatagcaaacattattgaggtaaaaatgttttggacaattattatacgcgatggaatagttcggttaaagagcgactaaaggcgtctgagtatattactaaaacaaatgcggccttcaaggaatagattgaacatactggtgaaattaaaacagggaatgaggaagaagctaaattcgaatgagagtgatctaaggcttctagaattgtatatggaggtgtggtaacgtgagcaagcttatatagaaggattaagtgatcaagtttagtgtaatactaggaatgataaggtgttcattaacgcacattacaactaaaaataccgtaaatgccctcaagaggatgatatatccaaagcaaaaaccttcattctttcatgaatttaaagtattatataagctactgaaaaagttttgtataaaaggtataatgataaagaacattcgttcttgtatggggtactttctctgagaatgaaaataatgtcttagggtgatataatgacaaattttattttaaatgaaaataaacagttatcattggcaattgaagatgagaacatagaaaatttttatatagatggtacagatttagtccgaaagataatccgtagatcaggttcaggagttacatcacgggttccggtccttagcacccaagatttagaaaacaagaaccttcatgaattatacgatgaatcttggctccgtatgaaaaacagacccaatactgagctcactactgagagtataaatattgcggatttatttagtggatgtggaggtctatccttaggggtttgggaggcatgccgtgccctggggataaatccaagattttcgtttgcttgtgatcttaacgaagctgccttatctgtgtacgaaaaaaacttttctcccgattttagcttgaatgaatccatcgaaaaacatattaatggcgagttaggtgctccattaactgttgaagagcaaagaataaaagataaggtgaaaaaaatagatttcattctagcaggtcctccttgccaagggcattctgatcttaataaccatactagacgaaaagaccctagaaacgctttactaatgagagtaagtagagttatagagttgttccaaccttcttcagtattagtggagaatgtaccaggaattattcatgataaatctggttcttttaaagaatttaagaatcatttaaagacacaaggttattacttcgatgaaatcgtactaaatgctgaaaaactaggtgtttcacaagcacgtcgtagatattttatttttgcttcaaaaactcctgtatcttccttaaatcaaataaatgaattttattcaaccaatagtaggccaattagttgggcaatatcagatttagtagaaaatgtaggtgatgatatattcaacactgcttccgagcattcattggaaaacaaaaggagaatagaatatctttttgaaaataacttgtttgaattacctaattcagaaagaccggattgtcatcggctaaaaccacattcatacaaatctgtgtatggcagaatgtattgggatagacctgctcccactataaccagagggtttggatcaacaggtcaagggagatttgttcattctttgttaaagagaacgataactccccatgaagcagctaggattcagttcttcccggacttttttaactttggtgaccttcggaggagacagtatcaagacgttatcggtaatgctgtgccttccaaactatcctatttattagcattacatcaattaagataaaaagatttgaggttgatatctttgaaagttgttagtttattctccggcataggcggaatagagcttggccttcatcagtcaggacatacaacagaaatattttgtgaggttgatcctttggcaaaagctgttttatcaaaaaacttccctggcgttaagatagaagatgatattaatgaaattagagagttaccaagctgtgatttagttgcggcagggtttccatgccaagatttaagtcaagctggaggtaaagaagggattgacggatcacgctccggtttagttaagaaactatttgaacttatagaaaagaaagaacatgcaaatcgccctccatggatactaattgaaaatgtcccatatatgttaaggttaaaccgtggtaaagctatgtcatatttaacatctgtcctttctgaattaggttatacttgggcatatcgaactgttgatgctcgttgttttggtttaccgcaacgaagacatagagttattttgttagcctctttatttgaagatccaaaagatgtgattttttcacaggatcattcagaaccagatttagatggaaagccttctgttgtggatcattccaactattatggtttttattggacggaagggttaagaggtgtcggctgggcacgtgaagcagttccacctataaaatgcggatcgtctgtaggtatagcctctccacctgcagtttggtctccttacgaggatatagtagggaccattaatataagggatgctgagcgcctacaaggattcccggaagattggacaaatatcactactgaaacaggtaaggatataaaagaaggtgccagatggagattggtgggaaatgctgtttcggtaagggtttctaaatggattggtgaaaacttaagtcagccaaaagggtcgatatcagattttgaaggtgaattagtgaccaagacttggccaagtgcagcatgggggtacggagataaaaagtataaagttcccgtatcaaaatgggttgcaaacacagaacaaatagctatttcagagtttttaaatcatccattaaaacctttatctgctagggcattaaacggttttttaggtagagcagccaggtgtacaaatgtaaattattcggatgaatttattaactcgttagaacgttgtaaggataggcaacttcaaaaggtttaacttttcacattaaagagagcatactaaaaagtatcggagctggataaaaccagctccgttttttatctttaattttttttgcattattccatcttttattcgaccagttccataaactccttttcaattctttgggggtttcgggtctcggcaagactttcatctaccctgaagtagaatttgatttttggttctgttcctgaaagtcgcaggcacatccagggatccgacttcaagaaaacatttaagaacatttgactgtggaaggcccatgagttcctcagggccttccacagtctctcgattccggtcaagtaatcctcaacagtggtaaccttgacggaaccaaagctggccaaattcagaacggaaggcagcgagggtctgctgaatcagttctgccccttcttttccctttagtgttaatgagcgcaggccttcctgaaagtagccatattcttcaatactaaggagagcttcgtatagtgaaatccttttttcttatagtaagcacatacctcaactgcaaggacatccgtctgaacagcatccttgtctcggacaaagtcgccaatcagatagccatagctctcttcgtacccaaagaggaaattatgttctcctgtcttgtagtagccattaatctttctggcaatgaacttaaatcccgttaatacaccgattgtttcgactctgaaagaggttgcaacttccctcccaagctccgaggtaacaatcgttttaagaacgatcccattagatggaagtgttcctttcttttttatttgggttaagatatagtggagcagaagtggctcggtttgatttccggttaaaaccgtatactcaccattttcatttttaacagcaattccaagcctgtctgcatcgggatctgttgcaattaaatatcggcgtcaatttgctgccttccctgatggccagctcaaacgcggcatgttcttcagcatttggactggtgatagtggaaaacagagggcaggctgctcctgttcttttcccaccgctacatgcttgtagttcattgccgccaaggccattgcagtagatttgctgtaccatgaagcggcgtaaatacaaccttgatgtctgtttcatcttaaatatttgagttttctgaaatagttcaaggtatgccttgtccacctctgcgctatattttgatcaggccctttgctaggaggaagctggccgccatctggcccataaactttatatccattgtattcaggcgggttatggctcgcagtcacaacaataccggcaaaaccatgaaggtgacgtactgcaaacttaacacggttgtaggccttaatgactcgaaaacgtatgcgctggatgccagtgtcctggcggcttccattataaaagccgccaacccagcagaaactttccttaacgtatagatgtcatccggtttgttccagctccaatttccccgcgcatgcctcctgttccatatcccaaattccttataaaaagcatcttccaggtctttctcattccttcctgatttacccaaccccgattttagctcggtgcaagttgactaaactgtagccatttttctgttttgtttttccagcctatgattgacctacaataaaataacattattgttcattataatatagtctagaggttttcgaacgacgactttctgacataaatcgagtgctcttgtctgattatgtctagttatagttggttttttttattttgtctctaaatttgatgagatcatggtggcgaggaatttctttttcgacagccccaatcagtaccaattcgatatttgaattggtctctcaaacaattccatcctctttatttattatgatacaattatattaattagaaaatacatacatattagcttgtgtgattttatgggggtaaaatcaatgacttttataaaaagattagaggacgcttatgaaactctattagggaattaccctgccggagtatctagtaccagtactagtaagtataacgaaatacgaaagattgtttcagaagccttcttgatcggtgaaaatgaagtgtatgtaacgggaacatcaagaaggattagcaatttggacactcggtttgctcaaggaaatcaacggaataaacatacccggatggcagttgcttttatttctataccttctgtggacgattcggaattagatgaactaattataagaacgagaaatagtgcaattacaacctcatctaaattctgtaacggggaagaaaggggcacgatttttgacggaatattactttttttagtatttgagggtgaaaccaaagtgtatccgctagcattcttagttttcgagaacgattttgaattaaaggaaaaggctgaggaattgattccaggaattgaactcaaagaatacccgcgagctaatcaatccccagcccaggaaaataacaaaagcgctaaaaatgaagatgaggaaagtgcaaagagctatgtagtcttccttgatattgaggaagatggttctattgtggaatttgtagaagataaagacaaaacctatagaattggtgatatgatttggacggcttcacatactaatggttcatcagctatcacacgcagactggaagtaattgaagtcgttgaaaatcttgtggtgtgtaagataaaacataaatataatgaacctgttgataagaattcactgcttaagtttgtaaatattgaacaagatttgatttcatttctagacttacatccaaatgtccaaaatggaagtgagggatttgtatctggggacattgttgatgagaacgctactacatcatcggatgacttaccggaagactttgaaaataactaagcgataaactttaaataggggaaatgaactgatggaaatatccaaacaaacttcagatttattattgagcctagaaaagaaaaaaggcactttaccaaaattcagcgttttacgcagtattcctaggaataggattatttatggtgcaccaggaacagggaagagtaattatctagaaagggaagtgggaaagatctttggtgataatccatatgtattcacccgagttacttttttccctggttatacatatggacaatttataggtgcttataaaccggttcctatatataaaaaattaagcggtgaggaagagatatttagttcaaactttagggataagatggaaaactttgagccaatgattgattatcaatttgttcctggcccatttatcgatgtattaattaaagctctgaaaaatagatacactaattttatattaattatcgaagaaattaatcgtgccaatgcagcaagtgtttttggtgatatttttcaattattagacagaaataaaaacggtgaaagtgattatcctgttacattcgggccggacattatgaattatttagcgagaaacggaattaaagatgaaatgattaagctaccatccaatttctttatttgggcaactatgaataatgcggatcagggtgttttaccgctcgataccgcttttaagagaaggtggtcatttgaatatttagagttggaaaagtatagaaaggcagtggactcttggaagctgagcctcagatataaaggtcataataaagtaattatgtggaatgatttccgagacattattaataagcgtcttaaaggaaaagtaccagaggataagctgcttggaccttttttcctgaaagaaagtgaactgtggaatcagaatgtatttaaaaataaactgctttattatttgaaggaagatgttttcaagcataatccaacgattgattttttaaatgctagtactttctctgagctaattgaaaaatatgatggctcggataacatttttacttttgacatagatgattcgtcttttgtgagtgattaactatggataagtcaagtaagttcttctttgaagatcaaaaatacaataaagaaaggattgtacgtgtactcggtggtaatttagctttactcaaaagtaaaggtatattatatgaagattctagtggggatttaatatttaactatgtaggtgttatatctaatgggcgcaatgtaatattcattttgcctaaatactgtaacaggcacttagatgaacattcaaagcggactttgtttaataagttgctgaagatttttaaaaaatattcaggtttaaataaaagccgggaatctgattatttcgtatcggagctagatagtgatgaagtctccgactttatgatagcagattatttgcttaatgatttctcattgaatgggtattatcaaaaaaaatttactgaatatgaaattgatggagaaggaattatagattggagtaagacagttaatgaaattaccccagtattctcaaagggagttccatattatttcagtacttataatgaagtggtacaaaaagacgagtatcacttgatagttaaaattcataaatgggctttaagtaaatattttaatgatttcggagtcattttaggttttacgggactagaatttgataaatcctgtgatggtatgaaaattttggactacgctgatttttttggctcagtaataaataaagaaatcgtgaacacatatgttgatcgtgacgttaaattgttaaaggcattgaaaaccgcaattgatagggaagagaatcagttttctaaacgacccactctttctctgtatggaacaaaatactttcacagagtatgggaggaagtatgtaagaccgtattttcccatgttaatgaatacgtaaaaaagatatcaaggccaaattggattaactttacggatatagaggttaataaagagaaaaaaacactagaacccgatattattaaggctttcgaataccgttcaaaagaatactttttaatattagatgctaaatattataatataaattttgacggaaaaaagctggaggggaatcctggggttgaagatataactaagcagctgttatatgataaggcacttgaaaaactgtccagaggtaaaacaaaacataatgcttttctgtttccttcctctaattcaaccaatacctttaaagtatttggttctgttgattttgattttcttgatatagccgctgtaactcttgtttatatttctgctgaacaagtttataacttatatcttgaaaataaaacattttccactgatgacttatttaaatttgtaagtgaaattaataagtcaaaaaaacgacatagcgttataacttcaacattgtatggtaatatgtttttgtttacaaaaagattaagtgataaaaattagttctagaaggttaaaagccgataacataatacttgtcctcggttttgtcctcctatagttttaaaaatatttatcagcattaaatgttaagtctaaaaaacagtattttgagctggtttttttaatactattttcaactgttattagtcggaatgaatgggttgcatgatgtaaaaccgacaaaaaactcttgataaacaggggtttgtcggcaacggacttttatttttgatgcccttttggccatttgcaaattttcaaggcttctcatgagttcaccgaacttgtgagaagcttcttttttgatgtataaataaacatgtgtagtgtgtacaagcttacatggcatttcatttatggaccgcttctctctctattgcagacaggataccctattggtatactctcatacgacacaaaaaagacccagttatctaaataagtagtgccacccactcttagactgtttcccctagaaaagcactgtcaaagaggaatcctgttaaatcttgtgcttctttgcttttttagctaaaagacgatgttttccttgcaataaggaactcgtcttttatgttaaatataaagagcgacagaataatgacatctgatccccaaaaattcactgtcgatggagttagattcttccaacagtaccttaataaaatccgtcccgacgctatggagatagacaacctaattatcaactctgatattatcaaggaggacttaatagtgcatgtctcaaaaatgatagatcgtttggctttatatgatttacacagaaaaagaagcatagataaacatttttctgctgcttttacagtcgatatcaatgatagagaggaattttacagtgcaaatatagctgatgtttcaattgatttgaatgaatctagtggtgtttaattgaatctcatattcttcagaagaaccattcaatacttcttgaacaatatttaaagtattcatcagcttcctctactgaaacaatatcttcaatgaaatcggaaaagtattctagttctgttcttgttggaagaactattcttaagtatcctaaagggtctcttttaaatgaatataccatgataaatcagtctttcctttctgtttattcttagttaatattgatcgtacaattgagtcgacaagacaggctattgtagatttacgggcgttcattcactggataaaagcaaataaaaaagggcctgttatcatagtcggagtaagccttgggggatgggttactaatctaattgctaccctggaatcgaaaattgatgtagtggtatctatcttttatgccaatcgcctttcttattcgatatggaacacgatcccaggtaaatacataagagaagaattagaacaaaatggtgtgacctataatgagttaataaaatattgggatatcacagatcctagtcaagccttgccgaaagttaataaagataacgtactgctgatttctgctaaacatgatcaatatattgacttgaaagatgcagattatttatgggaaagttgggggagacctacaagatatgtctacaattgtggtcattccggtattgttctttgtcgcaaaaagctggcaaatgatacgctttcctttatacgagaaaaactggtttgatacatttgtagactttaataagaaacgaaaggccaactgcgacttcagttggcctttcctatttataataaagaaattgagtgagattgctgacagaactacgtactactcgttttctttagttgcccttgctaatcgttcaacctctccccgaatcccaatcgcaggctcccacgaatcaatcaaacgaatcgccttctgattagattccaccgctttcgttttctctcctttacgatacaacagctgcgccattccgtagtgatagtagatcagttcaacttgattggcgttatgtttgtcatagagcatttgctcaaaggcttcttccgctttttcaaactgatcacatttcacgtaagcgacacccagattgaaataggcttctatcgttttttcgccgccgtatgtggagctgatttcatttgccgcttcgtataattgaatggcttctacatgataacctctcgcaaagcttaagtcaccgcgaaccaatagaactctgtgttgaatggtaggggaaatcggttgattttcgatttcgtttaaaattgtctctgctttttcctgttgcccgtcttttaaaaacagccttgctttgagtgcatgtccccaaacctttagatcataggcatcgtgagcgtctgattgttcaagaatcttcagcccggcttctatttgctgaagcgctccgtctaaatcattgacttccatcaatgcccagcctgaggtgtcgattcggaagtacgcttctcgtgtgtgttggcctaagtgatgggcggcgtcggccgctttgcgtccgtattcgattcgcaggggcaggttgattctgcttagaaaatggctaatgcgggtgatgagttcgattaggatttctttttgttcagtttcacttgcccattggatgacctttaagatgtttggccattcttgtttcatttgatctaagttccgtcccagcaggtagctccaatagatagagttgggctgttcccgctttaaatgggtttcggcataatcaatataatagtgcgcccagcgattgcgggcttctttttcatattcgtgctgttcggacaagtgctgttctccgtaagcgacaacggtttggtgcgctaagtattgtgtcctgccttggcttcgttccggctgaatcagcgcatatgaccgcatttgttccatagcgtaatgaaaacggcgggcgtctaatccggctgctgccgccaggcttttttcatcaggcggcttgctgaaaaagcaaagcgtctgccagagctttcgcgtatcttcattgcatctatcccaggtgcggccaaagaggaattcaaacaattccagcagtgagtagcctgcttttccaagctcatgaatcagctgctgagcggggatgtcatcgtctgacatataggcaatgctgagtgccatggctttcgggtttccggcagtcgctgaaatgaattcgtttttcaggtcagatgatagatgtaacagctgctccagcttttcccgtttacgtgggaggttgcatgtttgtaagcagtgatgcacttcttgttgaaaaaattcgtgggcatctgtttggtcaagaccgcttagctgaatggctgtcatttctccgaagctttcccgataagtttgctttacgttttcccgcgctgtaaggagaacttttacgccttgcggaaggctggtgataaattcatgaatgtcacgttctgcagtatcaatgctgtcaacgatcagcaggatcggtttttctctagtgtaattggctaacgcattgcggacgacaaaccgttttacattgattgatttatcgatttgttctttgcgtccgagctgataggcgatcgtatttaaaaaatcgctaaagcttaatcctttccaatcagcgctgacccagatgatgctgttgaatgccggccaaactgaagtatcgtcgacacaggaataggcggcttcaagagcaattgtggtttttcccatgccggcccagccggtgattaaacagactggtgatggagaaagcatccattgccgtatcgcttccatatcaaagctgcgtccgataaagcgtccggaccagcgtgagggtaaattatgcgtgatgggctgttctgtaagcgcattcgtttcttggccgggtctgtcatgaaacagccgttttactacattttcaatttcgccttcactcggagccccgaataatccgtcttttcgcagtattttcgcttttttcaaacaggatgctgcccatacaggcaatgcgggtttgatgactgggatagtggtggcttccagcaagtcggtcaaccactcgatatccaagtcggtcttttcgagaatgatccagatcattccgaacagttttccgtcgtcgattcttccgggaatgtagtttgcccccatctgtccgatccagcttttgatcgtgtttggggagactcccagctggagtgcgattttatctatgtaagactgtcctgttttttcattctttttccttctgactttataatcaggatgaagttttagcgttttgacgccaggtgccagcatttgtgcaaattgttttcggttttcaagttcagccataagcctgcacctcctattagtactattttatcaatccagcgttttttgtatatgaaaaaataaaagtacagtgccgctgtccttttatacagcaggaaaggctgttgaacgtgttaaaaagcagataaaatgggggcagtaacagagaaaacaaaaatgtatgcacttacattttattttctaaagaaaggaacttgccaaatgactcacacagtacctcaaaacatgaaagcggctgttatgcacaacacaagagagatcaaaattgaaacattgcctgtgcctgatatcaatcatgatgaagtgttgattaaggtgatggctgtcggaatttgcggatctgatctgcattactatacaaatggccgaataggcaactatgttgtggaaaaaccatttatccttgggcatgaatgtgcgggtgaaattgccgctgtcggatcatctgtcgatcaattcaaggtgggagaccgcgtcgctgtagagccgggtgttacgtgcggacgctgtgaggcgtgcaaagaaggacgctataatctttgcccggatgtacagtttttggctacaccgccggtagacggtgcgtttgtccaatatattaaaatgcgtcaggactttgtttttttaatcccagactcactttcttatgaagaagctgctttgatcgagccgttttctgtcggtatccatgcggcggccagaacgaagctacagcccggatcaacgattgcgattatggggatgggccctgttgggttaatggctgttgccgcagctaaagcatttggggcaggcacaatcattgtcaccgacttagagccgctgcggttagaagctgcgaaaaaaatgggagcgactcacattattaatatacgtgaacaggatgcacttgaagagattaaaacgatcacgaatgatagaggcgttgatgttgcttgggaaacagcagggaatccagcggcattgcaatccgcactggcttctgtgcgccggggcggaaaattggcgattgtcggtttgccttcacagaacgagattccgctcaacgtgccgtttattgcggataatgagattgatatttacgggatcttccgttatgccaatacgtatccaaagggaatcgaatttcttgcttcaggcattgtggacacgaagcatctagtaacggaccaatattcgctggagcagacgcaagatgcgatggagcgggcgcttcaatttaagaatgaatgtttaaaagtgatggtgtatccaaatcgctgagtgaacagggaggatcttcgtattctccctcttgtttactggaaatgaaaacggattcttggggtgggaaatgatgattggaacagaaaaagtaacggcattgaaggcgaagcatcagtcaaaatccagcaccggcctgtcctggtttgaacgaatcggttatggattcggcgatatgtcgtataatattatctttcagtttgtaaacgcatacttattattttattatacagacgtcggcggcattcagcctgcggtaatcgcaactttgtttcttgttgtgcgtgtgctggatgctatttttgacccgatcatgggattgattttagataaaacgaatacaaggtggggaaaagcaaggccatatttgctgtgggtggcatttccttttgcgctattcacattcttatgtttcacgacgcctcatttcggtgagaccggaaatatggtatatgcgtatgtcacttatattctgcttgggatgtcctttagtatgcaaacgatcccggtgaacagcttaacggggcggatgacgaattcggtggaggaacgaacggttctgaccacaacccggatgattttggtgtatatcggcattcttttatccatttcctgtgcgacaccgcttgcaactgctatcggaggagaggatcaggcgtttggatttcagatgacggcgctcatctatgcggctgtcagcatcgttttgaatctatttagtttctttactgtacgggagcggattcagcctaaaaagagaaaaaaacaagggatcaaaaagacgttatccgttttattcaaaaacaaacccttgctcatgttaatttcatcatttttggcttttgcgatcgggtttaatattaagctcagcacgatggtgtattattttacgtataacgtaaaccataaagagttcgtgtttatgggcaccgttttatttttcggggcagcgctgatcagcaatttgtttattcctttcttttctgagaagtggggcagaaaacaagtcatgattatcacggcagctctatcgcttatttcttatgccggcctgcattttacgccgtattcttcaattccactcattttcatttggcttttcgcttcgggatttttcacaacgcctttaaatacgcttgcttggggaatggttgcggattgcgtcgattatgcggaatggaaaaccggaattcgcgcggatggtgttgtgatttcgagcatgagctttattaataagctgggtgttgcgttagccgggtcattttcggccatttatttaggaatcgccgggtatgtggcgaatacagaccagacagttgcgtcgttgaatgcgattaaaaatatgaatgctttgattccgggatttttcattttgctttctattattcttatcgccttctatcctttaacggaaaaaagatataaacacatcatctctgagctggagcaaaggtctgcgagataaatagatgtaaaatttttaatattcaatgttgtatttatggcaaaaagtaatatactgagactgtaatctagactttataaatgagtgtgataatatgcgtagtcattctgtagtttgtattggggaattgttgattgatttcttttgtaccgatgttgacgttgatttaatggaagggcgccaattcctgaaaagtgccggcggggcaccggcgaatgtgtcggcagcgattgccaagctgggcggagacgccgctttcagcggaaaagtaggaaaggatccgtttgggtattttctgaagcgaacattggacgctgtacatgtcgatacctctatgctggtgatggatgagaaagcgcctacaacgcttgcttttgtttcattaaaacaaaatggagagcgtgactttgtttttaatagaggcgcggacgctttgtttacgctggaggacattgaccaggaaaaactaaacgaagcgaaaatccttcatttcggctctgcgacggcactgttatcggatccgttttgctcagcctatttacggttgatgtcgattgcgaaagacaatggacagtttatttcgtttgaccctaactaccgtgaagatttatggaggggaagagtctcagagtttgtaagtgttgcgaaaaaagcgatcgctgtaagtgattttgtgaaagtcagtgacgaggaacttgagattatcagcggtgtgaaggatcatgaaaagggagttgcgatccttcatgagatcggagccaacattgtcgctgtgacacttgggaaaagcggaacgcttctttccaatggaaaagaccgtgaaatcattccaagcattccggtgacatcaattgactcaacaggggcgggagatgcttttgtcggtgcggctttatatcaattggcaaacacggatcagattcaatctgtagatgctgattttgtgaaactgcgtgagattgtggcgtttgccaataaggtcggagctcttgtgtgcactaaaattggagcgattgatgcactgccgagtttggatgagattggagtttctttgtaaatcattgaagatgtttcttgaaagtctttggacttttgggggcatctttttttattgcttacatttttgttcaggtaaaaagttgtatattttttgtttgaaatgtcattttttattaaaaaagtgaaacttttaacgataataaatagtatatgtaacaagggttaccgaattagctttaggaggaacgatataatgagtataattggaagatttaaagatattatgtctgcgaatatcaatgctttattggacaaggctgaaaatccggagaaaatggtagatcaatatttaagaaatatgaatagcgatttggctaaggttaaggcagaaacagcagctgttatggctgaggagcagagagcaaaaagagaatatcacgaatgccaggcggatatggaaaagatggaaagctatgcaatgaaggcgctgcaagccgggaatgagagcgatgcgagaaaatttcttgaaagaaaaacatctttggagtcaaagctttctgagctgcaggcggcgaatcaaattgctgcaaccaatgccgcacagatgagaaagatgcatgacaaattggtatctgacattggagagctggaagcacgcaaaaatatgatcaaggcgaagtgggcagtagcgaaaacgcaagaaagaatgaacaaactgggcgcttctgtttcaagtacaagccaatcaatgtctgcattcggccgaatggaggacaaagtaaataaggcacttgatcaggccaatgcaatggctgaactgaacagcgctccgcaggatgatatggctgatctgtctgcaaagtatgacactggcggttcaagccaggttgatgatgaacttgcggcgttaaaagcgaaaatgatgctcgataagtaatacataggaggccgcagctttcggctgcggcgtcattttatcataaaatgtgagagggaacggtaatgataatatcttataagtgtccgaactgcggcagtgatatggcatttgacagtgaaaccggctcgttatcctgcagcagctgcggaagacaggacaatattgaaagccttccgaaagaaaacattgcggcacggttttctgatgatgaagcaaaagaatatcaatgtaaaaactgcggtgccgttttgatcacggaagctgaaacgacagcaacgacgtgcagcttctgcggaggtgctgcaatacttgccgatcgtttatcaggacatttggcgccggcgaaggtcattccatttacaatcagcaagcaagaagcggagcaggcatttcgaaagtggtgcaaaaaaggccttctgacaccaagaggtttcatgtctgctgatcgtatcaaaagcatcaccggcatgtatattccattttggatgtttgatttaaatagtgaagtacaggtgagagcaaactgtaccagagtccatcaatatgaagaaggggattatatttgcacggaaacagagcactttgaagcgtttcgtgatatcaatctcgattatttgaaaatccctgtcgatgcctctgaaaaaatgaaagacgaattaatggacaaattggagccttattcatacgaagagctgaaggactttcaaacggcatatttggccggttatattgcggaaaagtacaattataccgatgaggagctttttccgagggcaaaagagaaaatcagcagttatatagattcatacatccattctactttttccggatatacgtcagtcaatgtgagggacaaacatattcacacgaaaaacgtgaacagcttttacgttttgcttcctgtttggatggtcagttacgattatgaaagagcggagcatatctttgcgatgaacgggcaaacaggaaaggtcgttggaaagccgccgatcagtcgaggaaaagtggctgcatggtttagcggaatagcaggcgggacatttcttgcgttgaagctcgtctcattgatgatgggaggcggattttgatgcgtggattttttgggaaagcgatctttgttgtgctggctgttttcatcatgatgcctttactgggtatcgaagcggtaagagcctctgaattgcagcagcatgtgtacgatcgcgctcatctattgtcaaaagcggagatcggaaaacttgaatctctctcggcaaagctgggtgcaaagagggacactgatttcatcattattacgaccaaaagcacaaacggtgaagatattgcagactataccggcgatttttatgatcgttacggaaaaggcagtacagccattctgacgattgatatgacaaacagagaagtgtttatcgcaggctttaaaaaagccgaacagtatttggacaacagcaggctcaatagcatcagaaatacgatttcatctgatttatccaatgaaaattattttgaagcttttgagacatatattcagctttcctataaagatatgggcataaaaccgggagtaaaccctgacaacatattctttacatggtggtttcagctgattgctgccatcgcagtcgggggaattgcggtttcaatcatgctttatcatgcaggcggcaaagtaacggttaatggaagtacatatatggatcagcgtacgtctgatgtgattgatcaatacgacacttatattagaacgactgtaacaagagaaagaaaaccatcagataaagacagcggcagcgatggcggtgttacgaaaggcggcacgtcatacagtgggagccggggcagtttttaaatgtaagaaatagagaaagggagaggcgtaatgtcgtttttcagaaatcaattagcgaatgtagtagagtgggaagaatttagagatgatatgattttttataaatggaacaatcgtgaaatcaaaaaagggagccgtttaatcattcgtcccggacaggatgctgtctttttgaacaatgggcgggttgaaggagtctttcaagatgatggcgattatgatattgaatcagaaattattccattcctttcaacgttaaagggctttaagtttggctttaacagcggcatgcgagctgaggtgctgtttgtcaatacgaaggaatttaccgtaagatggggaacaaaacaggcgataaatattccggcagcgggaatgccaggcgggatgcccattcgcgcaaacggcacatttaatttcaaggtgcaggactatatcagcctgattgataaaatcgctggcgtgaaagatcaatattttgtagaggatattaaaacccgtatcatttctattctggatcagcttctcatgaagtggatcacaagagaagggaaagatatgtttaatcttcaagcaaacgcttttgatattgccaagggaattcaagaggacttagatatgcaattaataagcgacgggatgacggtcactggttttcaaatcatgagctttaattatcctcaagaggttcaagatatgattacaaagaacgcttcctacggtatggttggggatgtgaacagataccagcaaatatcaatgacggatggaatggcatccggaaagatgagcggaagcggagcggcttcggatatggctggaatgatgatgggaatgaatatggccaatcagatgatgaaccaaatgaatcagaatcagcaggcacagtcatcaggcccacagtcaactggcagcggaagcaaaccgaatttctgtccaaactgcggaacaaaaacgggcgaagccaatttttgtccgaattgcggccagaagcttgtataagaatcatacagtgaaaagtccggagtgatcagcactcgggacttttttatttaggagaataagcattacctattgcttgctcctgaacaggccattttcgagcccccgcttggataattcccagcagcaattgacgacgttcctttattgaattgacggcaatttgaaatgtttgctttgataaagccggtatgcctgattgttgaagctttgagatgtctggttctggcggcgcttgttctgcaggatggatataggcagtatgaacggtatccagatagtttttgatacttgagcgcgcttctttgatatgaagctgattcggctgatattgttcaggaattccgtatttgaaaatggttagagcctcatccaatacagcaacagctataatggatgattcctgatgctgcgtgctgtggtaaaaatgaaggatggggaaggcgttatgctgagcggtcagctttcccagttctgatgaggcagcgacaagaagaaaatcaatgtcgtgaaaatctttgccattccatgcattatggacgatttcagttccgtcatgccctagacttaatacactttgggcaaaggagcgtttttgattaaccgcactcaagacggaaatcaaatacgtgacagaaaatgtgatggtaagcagtccttgagctgtttcaataatcgtgacaagcttccataggcctccgttcggagcgaggtcgccatttcctaatgtaaacatgacatagccggaaaaataaattcggtctgaccaggaagccggttcttttgattgagtttccataagtgagtgagggtcactcgagtaaatcaaaacccacccgctccaaaatagactgatccatatcactaacgtcaggcataacagcagaggaccagccatacttagaacctttgcgtggtcaccgctgattttgcggcagcccttccacagccaggcagacaggcatcttgtgatcgggccggcaccgctctctaaccataacgtggtccataaaaaatcaatcatccccgctgtcaataataaaaggcctgcaatgatataaccctcattcattttggttgcctcccttaagtcagccttcttttattttcttctctatttccttttatcctgagtctgaaacaattgaacgaatgtttgattttacagagaaaaataggtgggagttacccaacacttactcatttttcaatatgaacagaaaatcacaagatttttgacttgattcacacattttcatgaagaaaaacgttcattttccccttgaattggtgattttccttttatagagtaaaaaattttcagaaatttatattgactgaaagcgtttttataattatgataatatcagatataacaaaaatgtcactataacatcactacaattgaactattaagtgactaataaataccaaatgaacgaggttatgcacaaagaaatgaccattgttcttttaacgagaaatgaaatcgcttccatagggattgacatgctaagaagaagggaaggttatgaggttattggataaaaacatgaacaactattttctgaagcctgcttacgaaatgtgaggaaggcagcagccctggaataagtttttgacatacgcattttgaaaaagactgggggaaacagtatgaataaacaaggaaatcaaatgtcatttttacgtacaattattttagtctccactttcggcgggcttctttttggctatgataccggtgtgctcaatggagctttgccgtatatgggagagccggatcagcttaatctcaatgccttcacagaaggccttgtcaccagttcacttctttttggagcggcactgggtgctgtgtttggcggcaggatgtctgattttaacggccgccgcaaaaatattttgttcctcgctgttatattttttatttcaacgattgggtgtacgtttgcaccaaatgttacggtcatgattatttcccgttttgtgctcggtattgcggttgggggtgcatccgtaacggtgcctgcctatttagcagagatgtctcctgtggaaagcaggggacggatggtgacgcagaacgaattgatgattgtatcaggacagcttttggcctttgtttttaatgcgatccttggaacaacaatgggagacaactcccatgtgtggaggtttatgctggtcattgcgtcacttccagccttgttcctgtttttcggcatgatcagaatgcccgagagtccccgttggcttgtttctaaaggaagaaaagaagatgctttgcgtgtattgaaaaaaatcagggacgaaaaacgggcagcagctgagctgcaagaaattgaattcgctttcaaaaaagaagaccagcttgaaaaagcgacatttaaagatctttcagtcccatgggtgcgccgtattgtgtttattggattagggattgcgattgtacagcaaattacaggtgtgaattcgattatgtattatgggactgaaattctaagaaattccggtttccaaacggaagccgctttaatcggaaatattgcgaatggcgtgatttcggtattggcaacattcgtcggaatctggctgctgggaagagtggggcgccggccgatgctgatgacaggcttgatcggtacgacaacagcattattgctaatcgggatattctcacttgtacttgaaggatcaccggcacttccgtatgtagtcctgtcattaacggtcacatttcttgcttttcagcagggcgccatttcaccagtgacttggctgatgctatctgaaattttcccgcttcgccttcgcggactgggaatgggtgttacggtattctgtctgtggatggtgaattttgcagtcagtttcacgtttccgatattgctggcagctatcgggctgtccacaacgttctttatcttcgttggattaggaatttgctctgtcttgtttgtgaagaggtttttgccggaaacgaaagggctttcgcttgagcagctggaggaaaacttccgcgcttatgatcacagcggggcaaagaaggattctggggctgaagtgattggataatttaaaaaagaatccgcacccgagtgcggattctttttggtttcaaattagttaggtctaacaaggattttgacttggcttttctctttaataagagccccgaagccttcctcgatcaaatcatctagtacgatttttttcgttacgagtttgtcggctgagaaatagccttctttcattaatgacaatacagccgggaagatgtcgcggtatccgataattccttttactgtacgttctttgattacgatatcgttcggatggatttcagcacctttttcccaaatgctgacgatgacggtttcaccggcaattgtagtggactggatggcttgtcgtaacaccactgggacaccagtgacttcgaatgctacgtcaacaccgcctcctgtacgttctgcaatctcagcgactacatcgtctgttttagacggatcaacgatgatcgcgccaagctcctcagctttttgctggcgttcaggagaaagctcaacagcgtaaatatcagttgcaccggcagccttcagcgcttcaatgacaagaagtccgatcgggccgcagccgaatacagccgctttgtcgcctgctttgagtttgcttgagcggacagcgtatagagcaactgcagaaggttcaacgagcgcgccttgttcatatgataattcatcaggaagtttgaacaaaagctcttcatccacagagacgtattcagagaaaccgccgcctccgccggctaagccgaggaatcccatttgttcatcaaggttgtaggcgccttggtggccgtgtgtagcaaaaatcggctcgactacaacgcggtctccaactttataattttcaacgccttctccgacttcgacaacttcaccggagaattcatgccccattgtgacaggtgccgtttcatttgttaatgggtgcggtttgtcaaccggaataaagatcgggccgcccagatattcgtgtaaatcacttccgcagatgccgcaccatttgactttgatctttacttttcccggctccgtttttggctcttcgatatgttcaatacggatatccttttggttatgccatcttgctgccttcatggattaccactcctataacttttgatgtgagtaattccgcaccggtcaatatgaactgttcacaaaatcgccatttttaaaaccaaaaaagaaatgaaatttttatataatataatctacgtttttttgaaaaaaagaaactttaaagaaaaaagggtctcgcacactcttttttctttatatgagagtatcaatcgtttacatagctatgaatttggtttgaacaatacggtaatggttcgttcatattgaatgcgacaactactctatcaataattataactctaatactgctattataataggataatcttccatggtttattttagcagaggtaacttttttgactttgtaacattactgtaaggatattgaaataaaaaatagctggttgatcgtgtataatcttcctagatgttaacaaacagggggacgaaatgttgaagaaagtcattttagccgcttttatcttagtaggaagtactttgggagcttttagtttttcatcagatgccagtgcgaaacatgtgaacggaaatattacttggtataatggagtcgggaaaaaaggctcttcaggtaagaaacttggacattgggattgtgcgaccaaaatcggatttgatgttcctagaaacgggacaaaaatcagagcttatgcaaaagcgaagcctaaaaaggtgattacggtttataaaaatgatgttggcagaatgcctaatgcagtgctggatgttagccctaaagcgtttaaagcgcttggatacccattaagcaaaggtaaagtagcggggcattacagctattaatgtacatatataatctggaaagcaagaagtcacattcttgctttttctattggtggagataaaagatgaaaaaaagaatcatattattattagcagtgataatagcggcagctgccgcgggggttgcgttttatgttgcaaaggataaaggccatgagaaggctgctgatgtttcagtcaataccgaaagcggtgatgagctgctggtttcaattacagatacggatctgctgacaaagtattatgaaaatgacaaggtgatccatgaggagaagctgaccagctatccggcatttgccttggatcaaaaacagcaggtgctctattatacgggcaataatgaacagaatgaaatgaggctttttaaattggatctgaagtctcataaaaaaacgatgctttataaaggcgcggagagtgcggacagtttatttttatcaaaggaccgttcaaccatctatttccgcttaggaaaagcggacgaaagcaattttcgaatcgccgcttttgatctgaagacgaaaaagtataaaaatctttatcctgccgctaatgatcaggatgacaccgtcagcagcttcttttataaccaaaaaaacgattcatttgcattgcttcattattctgtagaagaagactacaagaaaacagatgaagcaaacgaaaagggcatcgaccctgaaccgacaacgattcattttgcggaaggccgccaaaataaatttaatgagctgaaaagcctgaaccaatttatcagcgatattgctgtttctgatgatgataaacgtattttattcacatcatatacgcaaaaaggaacggagcaaaccgcttctattcaaatgctcaatgcggatacgaaaaaatatgaaagcatcatctcaaatcaaaaatcatttaagctgttaattgacgcacagcctcagttttctaaggatgggaagaacatttattttcttgccgaagccaagggggctaaaaagctgaaggacgaaacagggcgtgaagctaaggtgcggacgatttattcctatagccttgagaataagaccttcaaaaaagtatgggaaaatccgaacggcatcatcaacagcttttttgtgattaactaataaaaaccactcggcatgagctgagtggcttttttaatggatgaggtgcagggctaatgatccgagccatttaaagatatgaatcagaggtaccgacaaaaacagaagttcaacatatgagttcattgcaacattcagctttttgaacgcagctctttttttcaagtctttttgctgctggtttgagatcacgttatcactcctcttatatccatattataccattaaaacagacaaaaaagccctaaacgtttacagttttgggcttctttcttcgtatttggcctcttgcaatgagaggcttttattctgaaatatagaattttgtctccgttcggggtttgtttgcttgcgggagactgcatttgttatagggaagaactagcttgttttcgtttggctgttgttttggagattcactaatgaacggatgccgtcgaccattttacttccgcacaaagggcacaatggcgtatcactgctggcgaagttttttcgggtccagccattacagtcttcttttgtgcattcccaagtactcacatcttcctttggcagcggttcttgatttcgtttgttatagtaagacataaagtcacttcttccctcatgtattttactgcacatttcctattgtctcatacttttccctaatctcctaattcctttttctttatgactttccaataaccccatctaaaaaggagaggagtgtgctgttaaaagcatctggctcttctaaaaacgggcaatggctgcttttaggaaaggtaacgagtgtcgcgtttggaatattgctgcgcaagtgttccccagctgctgtagagaaaaatttcttgtcttccccgaagcacagcaatgccggcacattgatgttttggagggtgccccggtaatcagcggccgtttggttaaataaaatcgtgctagaaatggcagccggctgtttgaggatttctgccagcatccattctgtttcggtctcggcaggcggttctgcgaacatattctggatgaagctttcgtagaaaggcagcgggtcagtttgaatggcgtgcatcgctgtttttaagccgtcaaaatcaaatggaccatgttcccagccctcccattgatagtccgaagcggattgatcgatgatcacagcggcttgaatgttatcattcccaaactgattgagataatcccatacgacaaaagcacccattgaccagccggcaagaacgacatgatcaagctccattgcatttagaaattcccttatgtcacgggcatattgggaaatggtgtggccgtgaagcactttgtcagattcgccgtgtcctctaagatcaagacgaatacattgataattggcagaaagcaccgaaaattgtttgtggaaaaattgtccgctcatcagcaccccatgtataaacaggatcggcgtcccgctcccgtgtgtttcatagtaaaggcgtgtctgatcttctaatatgatgtatggcatgtttctcctcctttagtttccatcatgagtatggctggctgctgttgagctgatgatggcagctgtcgcggctgcctgctgcgcttgaatgactgtttcgatagcggtgtatagtcctgattccatcagcagatttttctccatatgctcactgagatagaggctgacagcaattttaaagttcatttccttttgccatttaaaagctttttcctggtttaattcgtcagtgatgcacaaaacggttttgatatctggctcttccagaaatgtgaggagagcaaggtctggataatgataatcctttgtttttttgacagattcagtgatcgattgatatatctgtttgcaagcggaaacaagcatttcgggctctttttcactttgcaaggccagaatatggctgacctgatgtaagtactgtccttttttaaagccgttggctgccagcagttgatagcatgtttccgccttctgtagcgcctgcaaaccttttccgttttctccaagcagtacggcaagcggaacattctgagttgaagtgaggaaataatgatttttcttcatctgctgataaacagctagccccatgttcatctgttctttttggtttgtcgtttcagatttgccggtgagcaagatcagagcggaaaggtatgtgaacatatcccgcttataccctagcttcaccatttcattgtatacatcgatgaaagtctgaaatgtttgttttgcctcatgctgaaaatgaatgtccagaatagatgcaacagtaaagcggtggtgtgaattgagtgttgagaagctgccgatgtttgatttgatatagctgctcaaatcataaaagcgctgaaaatcaaactctcttttattcacaatatatgcagaagaaatgagcattaatatctgatcgtgtgaaactttccattttaattttgtttttaattcagcataaatggaaatgtaatgctttgttttttcatgtagatcgtgtgtgagcataaaaagcagctccttttgttgtttttacgtaatacgataaatagggccaaaggtttcataaagaaaaaacttgcctgctagaggcaagtttgtcgggttatttatggggatcagttatatccatcggtctcatcatgtcatagtcttcatgctctagaatatggcaatgccatacgtatcgtccgctgtacggaccgaatgtcgccgcgattctcaggacttcacctgcatgcgcttgaatggtgtctttccagcccttttcacttggcggcggcgggacagccggaccggtataggacaattccccgctttcttgataacgggcgatatcaaacggccgccggtctaatacacggaaggagactagatgcaggtggatcggatgtgttccgcgtgtcgggttgataatggaccatatttcagttgtgccgacttttggtgtttctgtgacgggatcgtgccagcgtttgttattaagcagaaggacgggtctgccgtattcgtcctgggtgcctgccagttttaacgttctgatgttttgtattctttcatgctgtaccgaagggtatgaggcgaggtacttcggctttctgctttcgtctttttgtgccaatggttttgtgactctgaattgcatgatattcgcatctgtttcaggattgacgtcaccgccgcagcccgcgctgtttgccaaaatgatcgattctccttcatatgctgtgaagtcaatgatgatatcgtaacgttcagcaggcgcaaggctgaaagaattcagtttaacagatcgcggcaggagccctccatctgaaccaatctgaataaaatctccgccattatcgagtgacaggttataggttcttgtattggaggcgttgatgacacggaatcggtatttccttggctcgacttccaagtatggccataccttcccgttgacgagtatggtttctccgcaaaaagccggaacgattgaaggattaggcagtgacggagaagggttttccggtgcgctcggataaaacaaagaaccatcctcattgatcgtgcggtctgtgataagaagcggcacatcgtattcgtctgaaggcagttttaagcgtttttcctttgggtcatgaatgatatatgcaccgacaagtccggcatagacatttagcctggtgagcgccatggcgtgatcgtgataccacaatatagccccgcgctgctggtttggataatgataaacctctcttttgaaataaggtcctgtttgttcaaagtctttggaaaaccaagcctccggatacccgtcactatcatctggcgtgacgccgccgtgtaaatgaacaacagtctttacctcgggctcttcatgctggctgtcactgtgatgaatggtgtgatcaatcggaaggaaatgcgtggaaggaaggttattcatccattttacatatacgttttcatttcttttaacctcaatggtcggtcccggaaataagccgttgtagccccacaggcgggttggagggagatcgcgatggagctgatgagtgcattcctccatggtgacttcgtagtatgttttttcttttgattgctgtactggctttagtgtatctgggattgggagagcatccacaaatttttcaagtgtcattttcatctgtccttatctaaattttccaaattggtactatagttaatgacaataaggacgtgatggttacaaaaaatcttcgtgctgcagcccgcccgaagaagaaaataacaaaatcctaaacggcaggccgtttaggatttgatcagcattaaggcaggatatcgggttgctgctgtgtgactgggttggcagccgctttctcgctcaccttgcgttttctgaacacaaggtaagaaatcagaacgattcccgtgatgacgcctgtcagcagcagctcgtctctcatggaatcaataaacgccatggacactaaaattccgcaaatggcgatgatggtcaagtaggttaggaaagggaagagccacattttgatcttcaatgcttctgggtttgttttttcgagttttttccgcattttcagctgggaaacggcgatgacaagatagacgagtaaagcgattgcgcctgatgagttgactaagaataaaaagacggtatccggtgaaaaatagttcattacgaccgcgatataagagaaaaatgtcccggccacaatggcttgtacgggaacgccttttttgctcaatttcataaaacggcgcggcgcttcatttctttctgcaagtgaatacagcattctggatgtggtatacaaacctgaattcaggcaagagagtacggctgtgaggacgataaagttcataatctgtgcggctgcgggcactcctatatgctcaagtacagcgacgaaagggctttctaaaatatttgctgaattccatggcaacagcgccacgacaatggcgattgagcccacgtaaaagacgatgatgcgccatacaacggatctggtggcttttgtcacagattcgatcgggttggatgtttcccctgctgcaatggcaacgatttcagttcccataaaagagaagatgacaacgacaatgccgagcaatacggagctgatgccctccgggaaaaatccgcctttgcctgtaagattcgaaaaaccgactggctcactgcccggtgcaaagccaaaaataaaggcaaaaccaacgattagaaaagcaatgatagtcacaactttaatgagggagaaccaatattcaaactcaccgaaagacttaacggagtagacgtttgtcagggtgagcacaatggtcaagatcaaacttgtcagccacagcggaatatcatggaaccagtattgaataatgccagcaccggcaatggcttcgatcgctatgacgatcacccagaaaaaccagtacagccagccgattgtaaatcctgcccacggtccgatggcgtcgtgagcgtattgagaaaacgatccgctcgtcgggtttacggcagacatctcaccgagcattctcataataaaaatcaccaataatccggctaacgcgtaagaaacaacggcacccggaccggtcgagtgaatcactgaaccgctgcctacaaataggccggctccgattacaccggcaatcgaaatcattgtcatatggcgggtctttaattccttttttaatcctgattgagactggttcataagttacctccttttaaaatgcaatcattactgaatattatgataattgaaactctatcataaatatacagtttgtcgaaaattcgtgtaagaaaatataccagcttatttcaaatttgtagtgttttgtttgcgctttcagcgaatgtgtggaaaaaatgtttcgttttttattcgctgtgtgattttgcgtaatatttacaattcgatagaatgcgagaagcactggtgtccttgggtttgatgggatttttggcggagcaaataaattggatgagagaaaaagtgttccttcgtcactatttttctgtggcgggtgaatcatgtttctgtagacccactgcggatcagctttgtaagataataataggaaaatgtgagcgagaggaggttttgtatggagagatatgatgaactgaaaaagggagaatccggagcgctggtcagcattgccgcgtatctagttctttccgcaattaaactgatcatcggttatctttttcactcggaagcacttacggcagacgggttaaataacacaactgacattattgcttctgttgctgtgctgattggcctgcgcatctctcaaaagcctcctgacgaagatcatccatacggccactttcgagcggaaacgattgcatcgcttatcgcatcgtttattatgatggttgtcggactgcaagtgctgttcagcgccggagaatctattttttctgctaaacaagagacgccagatatgattgcggcttggacggcagcgggcggggcagtcctgatgctgatcgtttaccggtacaataaaaggctggccaaaaaggtgaagagccaggcgctccttgctgcggctgctgataataaatcagacgcattcgtcagtatcggcacatttatcggcattgtggctgctcaattccatcttgcttggattgatacggtcactgcgtttgtgatcggtctgcttatttgcaagaccgcatgggatatctttaaagagtcatctcactctttgacagatggattcgacataaaggacatttccgcttataaacagacaatcgaaaaaatctccggtgtgagccgtttaaaagacataaaagcaagatacttgggcagtacggttcatgttgatgtggtggttgaggtatcggcagatttaaatattacggaaagccacgatatagccaatgaaattgagcggagaatgaaggaggagcatgcgattgattattcgcatgttcatatggagcctttagaacaaaaataatggagcttcctgtcacaggaagcttcagcgtgtcgacaaaccctcgcattcgttgtcaggtctgcgcttcggtgctcacgaattagaacattcgctccgctcctatgctcgtccttcctagacttcaagggttttcaatcacgctgaaaagatgacaaaaccctaaaatgaaagccattttaggattttgtcaacaatctggagcttcctgccacaggaagcttttttgtgtgttttggccagctttattggtaacaatttgctagaatcgtttttttatacagattgctttttgtggtaaagttaggttacattatgatgaattttgtagatgactaggaggaaaataatggcatatcaagaagacctgcatcctttgctggggaaagcagttgaacatattaatagagtaatggttggaaaacgagacatcgccatactcagcttagcagcccttcttgccaaagggcatgtgctgcttgaggatgtacccggagtcggaaaaacgatgatggtccgcgcgctggcaaagtcaatcggcgccgatttcaaaagaatccaattcactccggatttgctgccatctgatgtaacaggggtatctatctataatgcgaaaacgatggaatttgaatatcgtcccggcccaattatgggaaatatcgtgctggcagatgaaatcaaccgtacctctccgaagacacagtcggctttgctcgaagcgatggaagaggggagcgtcacggtagatggccatacgatgcagcttgccgatccgttttttgtgatggcaacgcaaaacccggtcgaatatgaagggacctatcctttgccggaagctcagcttgaccgttttttattcaaacttcggatgggttatccgtcctttaatgaagagcttgacgtcttatctcttcaggaaaaaagccatccgattgagacgcttgagccggttattgcaaaagaagacttcatctttttacagagggaagtgcaaaatgtccgtgctgatgacagcattaaggaatatatcgttgaaattgtgcagaaaacgagacagcatccttctgttcaattaggcgtcagtccgcgcggctcaatcgccctcatgaaagcggcacaggcatacgcgctgctgcatcatcgcgactatgtcataccggatgatattcaatatttagctcctttcacgctgccgcaccggatgatgcttcatcctgaggcaaaatttgaagggattcaggcagaagcgatcgtaagggagatcatgtcagctgtgaaggtgccggttcaaaggtcggcggtccgctgatgaataagaaatggcaatggctcgtatatggttggaagctgattatattaactttattgacggctgctgttttttcttatgcgatgtttcagggcggctttgtcagctggtttttgttttacgcgtttctcccttttgtcttgtatgccgggctgttggccttgtatccgctccgttcttttcaggcttcaaggcaaatggataaaacacaattgcatgcgggggacaggctgggcgtaacggttacgctgagaagaaagctgccatttccgctgatgtatatggtgattgaagattgcctgccagaaggtatcgagtcattaaatcgagacggagccgcggccaaacggctcgtttttccttggtttaaacggagcatgacgatgtcgtatgaattagctcgggtaccgcgcggagagcatcactttcattctgtcagggtgcgaaccggggatgttcttggcttgattgaaaaaacagcattttttgagctggatgataccttgtttgtttatccattctatcagcgtttttcctatcaggtgaatgagaggcatcaggaagacggtgtaagcggttcttctcctattcatcagcaccattcctcagtcgcagcaagtgtgcggaattatcagccgggagaccggtttgctgcgttagattggaagacatctgcacggcggagccagctgatgacgaaggaatttgagccttctcgcagcaaaaatctgtttctgctgatggaccgtttttcctcagacgcattcgaagaggtcgtttcagtgacagcttcgattcttcattctgttttaaaaaacggcgcgggtgctggtctggcttccatcgggaaggaaaaaaacattttccctattcaggaaggggatcagcattttaagcacatgcttcggcatttagccatcgctcattgtgatgcggcagacccgataagccgatatgcacgggaagagctgggaaagccatctgttcgccaagctgatcaagttgttgtcacgggacagttaacggaagatatgctgcacctcgcagaaataggaggcggccgggttacggtgatactggcaaaagagaaagatgctgagctctctcaagctgaaaatgtcatgattgaacgcatgatgaaacgccaaatcagagttcggatcatgaggggcgggcgagtttcgcgtgttgtttagaaagagaggtgactggttcacatgccgcacgatgatcacaagggaagccgtttgagcttgctgttattttattttctggcttttttattgctgtgggagtggcttaggccgcttgacagttttactgaaacgaaacatacaggcttttttagtgtctttatcggcttgacgtttctgctgacttttttcaggatgaggtggtttgtcaccgttcctttttgtgtcatatttacattgatctcgatacacatcctgttttatcaaggatctatattcgacttgagctgggtcagctcttttttgcaggatgtctatctgaatatcacgctgattcaatcagggcaatggaatgacatgattccttcatttcggaccctgctgttttttgtgctgctgtggctgctggtctatctcctgcattattgggtgatttaccagagaagaattttgtttttctttttgatgacagtagcgtatattacgattcttgatacctttacgccatatgatgccacttttgccgtaatccgtatcgtgctgatcggcttctttatgctgggccttttatacttggaacgcattaagctgatggaaagaatcacactgccaaaaacatctgtcctgaaatggtttcttcctttatctgtattggttttggctgcaacgggattcggactcgccgctccaaaatcagagccggcttggcctgatccggtgccttttcttaaaaaaatcactcatcaagaccgcgtgtctgcaggggaaagcaaaatcggatacgggaatcatgatgaatcactcggcggcccgttccagcaggatgctacacctgtttttacatggcagggaaaagagcgtacgtatttccgtgtggaaacgaaggacacgtataccggaaaaggctggattgaaacagacacaggcatgtcgtatcagcttagcaatggaaaagttgaaaatctgtggtttgaccataaggttgcgacagagcgccgcaccgtccgtgtaaaagtcgataagcactacgggtataaccatctgatgtatccgattggtgcggaaaccattcagccaaagcaggctgtctcacttgaaatgaacggcaacacggagcaaatttctccgatcagtgaacaagccggtgaaatcagaaatatggggaattatacagtaacgtacaattccccggtctataagctggatgaactgagaaaggtaaaagtgagaaaaaacagtgaggagtacacattcagcgatcgctacatgcagcttccagattcactgccagagcgggtgagaacccttgcgatcaaactgactcaggatcacgacaatatgtttgataaggtgaaagcggttgaggactatttagggtcaaatgcgttcacatatgaaacagaaaacgtgaccattccgaagaatgatgaagattatgtcgatcaatttctctttgaaacgaaaatgggttattgtgataacttttcttccgccatggtggtgctcttgcgctcggccggcattccggcccgctgggtaaagggttatacgtccggcgaatacaaagaagcagggaacaaaaatggcagcatttacgaagtgacaaataacaatgcccattcctgggtagaggtgtatttcccggaacagggctgggttacatttgagccgactaaagggtttacaaatccggctcaatttacatcttctgacacaaaagactctggcagcgatagcagcagctcgccgaagaaagcaaaagagaaacagaaagaagagaaaaaacagccgcaaaaagaggaaaaacaaaaggaaaagcgggagccagctgtttctaaaaagccgtccgcttcgcatactaatgccggtgcgggcttgtatgcagcgcttgcggttcttgcagtcctcctggtggcagctgtattgctgtatgttttccgctcgttatggattcctgttttcgccgtgaggaaattgaagcggcgcagtgatcagcacgcgttttttgaggcatatggcgcgctgctgaaacaactgaagagaaaaggactgccgaaacgagacagtgaaacgctgcgtgattatgcaaaacgaattgatgaaaaatacgacatagaagacatgtcaaagctgacattaagctatgaaagggcgctttacagaaatgaagattcttcggcgctatggaatgattcgagagagttatgggaaaatttaattaaaagaagatggtcttgaccgcttatcgacgtgttgttagaattagtgaatattatcggagtctgggagcgagttggcctgactccggcaaacggccttgccaaagagggcggagcgagcttcatatctgtcctcgtttttttctgtgtcaaaaaacttagaggagattaggtgacaaccatgacaaagttagtgaatgaaatgattcttgtccttgatttcggcagtcagtataaccagctgattacacgccgtatccgtgaattcggtgtttacagcgagctgcatccacatacattgacggctgaagaaattaaaaaaatgaatccaaaaggaattattttatccggcggtccaaacagtgtgtatgatgaaaactctttccgctgtgacgagaaaatcttcgagcttgatattcctgttttgggaatttgctacggcatgcagctgatgactcattaccttggcggtaaagttgaagcggcaagccagcgtgaatacggaaaagcaaacatccgcatcgaaggcacacctgatttgttcagagatcttccgaatgaacaagtggtttggatgagccacggcgatttggttgtagaagttcctgaaggcttcactgttgacgcgacaagccatcactgcccgaactcagcaatgagcaaagcggacaaaaaatggtatggcgttcagttccacccggaagtgcgccactctgaatacggcaatgatcttctgaaaaactttgtattcggtgtttgcgaatgcgaaggcgaatggtcaatggagaactttatcgaaatcgaaatgcaaaaaatccgtgaaacggtcggagacaaacaggttctttgcgcgctaagcggcggcgttgattcctctgttgttgctgttttgattcataaagcgatcggcgaccagctgacttgtatctttgtagaccatggtcttctccgtaaaggcgaagctgagggtgttatgaaaacattcagcgaaggctttaacatgaatgtgattaaagtagacgcaaaagatcgattcttaaacaaactaaaaggcgtttctgatcctgagcaaaaacgcaaaatcatcggtaatgaattcatttacgtgtttgatgatgaagcggacaagctcaaaggcatcgactaccttgcacaaggtacgctttacacagatatcatcgagagcggtacagcaacggcgcaaacgatcaaatctcaccacaatgtcggcggacttcctgaagacatgcagtttgagctgatcgagccgttaaatacgctcttcaaagacgaagtgcgcgcgcttggcacagagctcggcattccggatgaaatcgtatggcgtcagccgttcccaggaccgggactcggaatccgcgttcttggcgaagtaacagaagaaaaacttgaaatcgttcgtgaatcagatgcaatcttgcgtgaagaaattgcaaatcacggcttagagcgtgatatctggcaatacttcactgttcttcctgacatccgcagcgttggtgttatgggtgacgcaagaacatatgattacacaatcggaatccgcgccgttacatcaatcgacggcatgacatctgactgggcgcgtatcccgtgggatgtgcttgaagtcatttcgacacgtatcgtaaacgaagtgaagcacattaaccgcgtggtgtatgatattacaagtaagccgcctgcgacgattgagtgggaataagaatcaattaatggaaaccatctttttggcaattttgccgggaagatggttttatttgtttattacgaacaaaatccgattttgcgcgactattgttcgctttttgtattgttttttcaaaatgaacttggtacaatagacacagaaatcaaataagatgaattcgtataatcgcgggaatatggctcgcaagtctctaccaagctaccgtaaatggcttgactacgtaaacatttctttcgtttgatataaataaaacacggttatttattcaaactgaaatccgtctgtagtcaagcgtcccaaaatgtattgggacgttttttatttggcgttttcaggacagaataaatagcaaagagtgaagggagtcaaatagcttgaaaacgttttttcagtttgatgagctgggcaccagctatcgcaatgaaatcattggcggattaacgacttttttatctatggcatatattttgttcgtcaatccgattacgcttgctttggagagcgtgaaagattttccggaggcgctgagaattgaccagggtgcggtctttacggcgacagcgctggcgtctgcagcaggctgtatcttaatgggattaatagcgagatatccgattgccatcgcgccgggtatggggctgaacgcgttttttgcgttttctgttgtccttggtatgggtatttcatggcaggcagctttgtccggtgtttttatttcaggtcttattttcgttgctctttctttaacaggttttcgtgaaaaaatcatcaacgccattccgcctgagctgaaattggcagtcggtgcggggatcggcctgtttattacatttgttggattacaaggttcaggaatcattacagcgaatccttctacgctcgtcacgatcggaaacattcacagcggtcctgtgctgttaacgattttcggtgtgattgtcacggttattttaatggtgcttcgcgtgaacgcaggcgtgtttatcgggatgctattaacagcggtagccggcatgattttcggtttggttccggttccgactcaaattatcggcagtgtgccaagccttgcgccgactttcggacaagcgtggattcacctcccggatattttctctgtacaaatgctgatcgttattttaacattcttgtttgtcggattttttgatacagctggtacacttgttgctgtggcaacacaagctggtttaatgaaggaaaacaaattgccgcgtgcgggccgtgcgcttttagctgattcatcttctattgtgatcggtgccgtgcttggtacgtctacaacaacttcttacgtggaatcaagctcaggtgtcgctgcgggtgcccggtcaggatttgccgcaattgtaacagggattctctttttactggctacgtttttctcgccgctcctatcagtcgttacgtcaaatgtaacagcgccggcgcttattattgttggtgcattgatggtggcgccgcttggcaaaatcgcttgggataagttcgaagtggccgttcctgctttccttaccatgatcatgatgccgttaacgtacagcatcgcgactggtattgccatcggatttattttctatccgattacaatggtgtgcaaaggaaaagcaaaagaggttcatccaatcatgtacgggctgtttgtcgtatttatcctgtactttatcttcttaaaataaggaatgaaaaaccagctgcactggcagctggtttttttgttgcaaaagataaaaccatttcatacgatataccgtcatgtagatgtgccgccatgctttacttaaatggaaatgacttgactgttcaggaaggcttcggtaccttatataagtgttttattttcttgctgaatggtattccgccgtatttttttgataggagttgctgacatgacggaagaaagaaaagaaacgtttgaagaagaaattaaccagagtgaaagaatagatgcagatgaagaaccgctatcgagaatgtccagaaaggcgagccggcaaagcaagcagaagcaaaaacaaaagcagaaaccgcgccaggaacgcggtgaatcaactgttaaagacaagcttgcgtctgtttgggcagccatcaacagatattgcggttttgcgttctcgattttaaaatctccggcgaaaactgtcgtaacggatggtttttctcattataagtacggtctgatttcaatgcttatattcagtatcattttttcaattgggaattggtttcagttaaaggcaagctggaatcggccgctcggtttcggagaacgccatcatgctttctatgacgggtttttagttgttcttgtgtatttgctgatctttttcgcggtaatggtctttgctatatgggctgtctcccgctatatgatgaagcagaaggtgacgttcagagaagcggctgccgtattgggttcattgcttgtacccgtaattgctgtttcaatcctttggctgatctttgcgatcgtaaatatcccaatgctgacagtactgtttacggtgctgatcttgttttccatcttttttatcatcgcgctgtatgtacagcgtgtgtaccaggcggcacaagatgcaccaattgattatatctattgtgtatttgcagtagttgcgatagcgctgctgtttacggcagtgacttggccgtttatttctgaatatattacggcgtcgttgattccgctttaatgaaaaaaccggctaatcctagccggtttttttatgtcacactttttacaaatatatctaaaaaacatagttgatttgtaggattaacccgtgtatgatggggaaaatgctgaaaacgtccagcgcaaaaacctttatgtttaaggaggatgatggacatggctgatgtacttcgccgagcaattaaccaaaagaagcaatttttaaaaaccaaattactgctctcggaattttatcaaggaagaggggaacagcttgctgactacacgctgagtgagcttgagaaagaatacaagtcccttcagaaaatgaaaaaagagatctgacaatagatataaagaggtgagtctgctgaaaagcgggcttttttgttttgattttgaaaaggcgagaaagagggtaaactactactgttcaacacataaaagcgtgtcgaaatattttgcttaagcttacgggcgaagctgattgtaaacggctcatttctctagtagaatatgaatgctttgtgcaagctgaagagtagggggatgaataaaatgatgcaaaccatcttatcaaatgggatagccatggttctcataattctcattattaatattgtctatgtgtcattttttacgataagaatgattttaacgctgaaaggacagcgttatttagcggccggcatcagtacgattgaaatactggtttatgtgacaggactgagtctggtgctcgataacttagaccagattcaaaatgtgatcgcgtacgcgctcggttacggtcttggcgtaattgtcggcatgaaaatagaagaaaaattggcgcttggctatattatggtcaatgtgattacgaaggagctcgatcttgatcttccgaagcagctccgtgaaaaaggctacggcgtgacaaactgggtggcaggcgggcttgaaggcgaccgcacagcccttcagatcctgacgccgagaagatatgaactccagctatatgatacgattaaaacacttgattcaaaagcctttattattgcgtacgaaccaaaaacaatccacggcggcttctgggtcaaagcggtgaagaagaggagaattaaagaataatggcaaagccgaagaagaaaaagtttgaagtgacagagcagcaaacgattgatgcggtgcttcagcaaatgaaagaagaaggatatctgcctgtaaggcgaatggaagagcctatttttatggaaaaaaaggaaaatgggtcaattcagatcgttccgtgcgggaaaaaaatcgtatttgaagggaaattgatctaaaacacgaacattagtagaatgaatttttgtatcgttcgataatatcgttgacattatccatgtccgttgttaagataaacatgaaatcaaaacacgacctcatataatcttgggaatatggcccataagtttctacccggcaaccgtaaattgccggactatgcaggaaagtgatcgataaaactgacatggatatatcgcagaagcgaacgactgacgatacatgtaccatgcccggtttgtattgcttcctcataagtgcaatgcagagcgggtattttttattttctgaaaacaaaagcattagaaggtggggaacagaatgcagccgctagtaggaatcatcatgggaagcacttccgattgggagacaatgaaacacgcatgcgacatacttgacgaactcaatgttccgtacgaaaaaaaggtcgtttccgctcaccggacgcctgatttcatgtttgaatatgctgaaactgctagagaaagaggcatcaaggtgattattgccggtgccggaggagcggcgcatctgccagggatgacggctgcgaaaacaacactgccagtcattggagttccggttcagtccaaggcgctgaacggaatggattcacttctttccatcgtccaaatgcctggaggcgtgcctgttgcgacaacatccatcggcaaagcgggtgctgtgaacgcaggcctgttagcggcgcaaattttgtcagcatttgacgaagaccttgcccgtaagctggatgagagaagagaaaatacaaaacagacagtgttagaaagcagtgatcagcttgtctaaacaaatcatctatccgggagctgtaatcggcattatcggcggcggccagcttgggaaaatgatggctgtgtccgccaaacaaatggggtataaagtcgcggtcgttgatccggtgaaagattcgccgtgcgggcaggttgcggatgtcgaaattaccgctcattataatgaccgtgaagcgattcgaaaattggctgaaatcagcgatatcatcacatatgagtttgaaaacatcgactatgatgcgctgcattggctaaaagatcatgcgtatctcccgcaaggaagtgagctgctgcttattacccaaaaccgtgaaacagagaaaaaagcaattcaatccgcgggctgtgaagtcgcaccgtacagcatcgtcaaaacaaagaatgaattgaaacaggcagtacaggagctcaggcttccggcagtgctgaaaacatgccgcggcgggtacgacggcaaaggccaatttgtgataaaagaagaggcgcaaatggagcaggcagccgctctgttagaacacggaacttgcattcttgaaagctgggtttcttttaaaatggaactgtcggtgatcgtcgttagatcggtaaacggtgaaatttcaacatttccgacagctgaaaacattcaccacaacaatattcttttccaaagcatcgtgcccgcacgggtagagaaagggattcagcagaaggctgctgatctcgcagttaagcttgcagatgagcttaaccttgtcggaccgcttgctgttgagatgttcctgacagaggacggagagcttttggtcaatgaactggcgccaagaccgcacaattcagggcattatacgctggacctttgcgagacgagccagtttgagcagcatatcagagcggtatgcgggcttccgcttgggaagacagatttgctgaagccgggcatgatggtgaatcttctcggcgatgaagtgaagcttgttgaggaagacccggagcttttaaaagaggcaaagctatatatatacggaaaacatgaaatcaaaaaaggccgcaaaatggggcatattacatttatgaagcagcctgaagacgaatggattcaggagatcacaaataaatggatgaatagagacggaggacaagcagaatgatcgaacgttattcaagacctgaaatgtccgcgatttggacggatgaaaacagatttcaagcatggttagaggttgaaattcttgcctgtgaagcgtgggcggagcttggcgtcattccgaaagaagatgtaaaggttatgcgcgaaaacgcgtcatttgacatcaaccgcattttagaaatcgaaaaggacacgcgccatgacgttgtcgcttttacgcgcgctgtatccgaatcactgggcgaagaaagaaaatgggtgcattacggcttaacgtcaactgacgttgttgatacggctctttcctacttattaaaacaggcaaacgatattttgctcaaggatcttgagagatttgttgacattataaaagaaaaagcgaaagaacataaatacacagtcatgatggggcgcacacacggcgtacacgctgagcctacaacattcggcttaaaacttgcgctttggcatgaagaaatgaaacgtaatcttgagcgcttcaaacaagcgaaagcaggcatcgaggttggaaagatttccggtgctgtcggcacatatgcgaacattgatccatttgttgaacaatatgtctgtgagaagctcggattgaaagcagcaccgatttccactcaaacccttcagcgtgaccgccatgctgactatatggcaacacttgctttgatcgcgacaagcatcgagaaattcgctgtggaaatccgcggactgcaaaagagtgaaacacgtgaagtagaggaatttttcgcgaaagggcaaaagggttcatctgcaatgccgcataaacgaaatccgattggctctgaaaacatgacaggcatggcgcgcgtgatccgcggctacatgatgacagcttacgaaaatgttccattatggcatgagcgcgatatttctcattcttcagcagaacgaattattcttccggatgcgacaattgcgctgaactacatgctgaaccgcttctccaacatcgtgaagaacttaacggtcttcccggaaaacatgaagcgcaacatggaccgcactctcggccttatctattctcagcgtgtgctccttgctttgattgacacaggcctgactcgtgaagaagcctatgatacagttcagccgaaagcaatggaagcgtgggaaaaacaagtgccgttccgcgagcttgtggaagcggaagagaaaatcacgtcacgtctttctccagaaaaaattgctgactgctttgattacaattaccatctgaaaaatgttgatctgatctttgaacgtttaggtttagcatagaagaagcttttagcggcttcttctaagccgccgcagtttgaaaattcccaacattcgggttaggaggccttccgtgaatattgtgaagaatgaacttttatacgaaggaaaagcaaaaaagatctacaaaaccgatgacgaaaacacgctgtatgtcgtgtataaagactccgccactgcctttaacggcgagaaaaaagcagaaatcagcggaaaagggcgcttaaataatgaaatttcaagcctcattttcaaacaccttcatgctaagggcattaacaatcattttatcgagcgcatttcggaaacggagcagctcattaaaaaggtaacgattgtgccgcttgaagtcgtggtaagaaatgttgtggcaggaagcatgtccaaacgtctcggcattccagaaggcacggagcttgagcagccgattatcgagttttactacaaggatgacgcgctgggtgatccgctcatcacagaagatcatatttggcttttgaaggcggcgactcctgagcaggtagaaaccattaagtccattacaacaatagtaaatgaagagcttcaaagcatcttcgacgattgtcatgtcagattaatagatttcaagcttgaattcggtttagatgcagaagggcaagtgcttttggcggatgaaatatctcctgacacatgccgcttgtgggataaagaaacgaacgaaaagctggacaaagatttattcagacgcaatctgggaagcttaaccgacgcatacgaagagattttcaatagactgggaggcattcatcatgtataaagtaaaagtttatgtcagcttaaaagaaagtgtactagatccacaagggagcgctgtccagcatgccttgcacagtatgacttacaacgaagttcaagatgtgcgcatcgggaaatacatggagcttaccattgaaaaatctgaccgtgatcttgacgtgctagtgaaagaaatgtgcgaaaaacttcttgcgaacacagtgattgaagattatagatatgaggttgaggaggtagtcgcacagtgaaatttgcggtgattgtgttacccggctccaactgtgatatcgatatgtatcatgctgtaaaggatgagctcggccatgaagtggaatacgtctggcatgaggaaacaagccttgacggcttcgacggcgtgttaattccgggaggattttcttacggcgattacttaagatgcggcgccatcgcccgatttgcgaatattatgccagctgtcaaacaagcagcggctgaaggaaaacctgttcttggcgtctgtaacggattccagattttacaggagcttgggctgctgccaggcgcaatgagacgcaacaaagatctgaagttcatttgccgtccggttgaattgattgttcagaacgacgaaaccttattcacagcttcctacgaaaagggagaatcgattacaatcccggttgcccatggtgaagggaatttctactgtgatgacgagacgcttgctacattaaaggaaaacaatcaaattgctttcacatacggctctaatattaatggaagtgtcagcgacattgccggtgtcgtgaatgagaaaggcaatgtattaggcatgatgcctcaccctgagcgcgcggtcgatgaactgcttggaagcgccgacggtcttaaattgttccagtctatcgtgaaaaattggagggaaactcatgtcactactgcttgaaccaagtaaagaacaaataaaagaagagaaactgtatcagcaaatgggtgtcagtgatgatgagtttgcattgatagaatccattcttggaagattgccgaactacacagaaatcggaattttttctgtcatgtggtctgagcattgcagctataaaaactcaaagccgattctgcgtaaattcccgacaagcggcgagcgtgtgctgcaggggccgggggaaggcgccggaatcgttgatatcggtgataaccaagcggttgtgttcaaaattgaatcacataaccacccatcagctctcgagccttaccaaggcgctgcgactggcgtaggcggaattatccgtgatgtattctcaatgggtgcacgcccaatcgctgtattgaactctcttcgatttggtgaactgacttcaccccgcgtgaagtacttgtttgaagaagtagtagcgggtatcgccggatacggcaactgtatcggcatcccgacagtcggcggagaagtgcagtttgacagcagctatgaaggaaatccgctcgtcaacgcaatgtgcgtcggtttaatcaaccatgaagacatcaaaaaaggccaggcaaagggtgtcggcaacacagtaatgtacgtaggagcgaaaacagggcgtgacggcatccacggcgctacgtttgcttctgaagaaatgtcagactcgtctgaagaaaagcgttctgctgtccaagtcggcgatccgtttatggagaagcttttgcttgaagcatgtctggaagtcatccaatgcgacgccttagtcggcattcaggatatgggagctgccggtttaacaagctcaagtgcagaaatggcaagtaaagccggttctggcattgaaatgaatcttgacctgattcctcagcgcgaaacaggcatgaccgcgtatgaaatgatgctttctgaatcacaagaacggatgcttttggttattgagcgcggacgtgagcaggaaatcatcgatatttttgacaagtatgatcttgaagcggtttctgtcggacatgtgacagatgataaaatgcttcgcctgacacataaaggagaggttgtgtgcgagctgcctgttgatgccttggcagaagaagcaccggtttaccataagccttctcaagagcctgcttactatcgcgagtttttggaaacagacgttccggctccgcaaattgaagatgcgaatgaaatgctgaaggcccttcttcagcagccgacgattgcgagtaaagagtgggtttatgatcagtatgactacatggtgcgcacgaatacagttgtcgctcctgggtctgatgctggtgttctcagaatccgcggaacgaaaaaggcgctggcgatgacgacagactgtaacgcgcgttatctctatcttgatcctgaagtcggagggaaaattgctgtcgctgaagcagcgcgcaacatcatttgctcaggcgcagaaccgcttgcggtgacagataaccttaacttcggaaaccctgagaagccggaaatcttctggcagatcgaaaaagcggcagacggcataagcgaagcgtgcaatgttctcagcactccggttatcggcggtaacgtatcgctttataacgaatcaaacggcacggcgatctatccgacaccagttatcggcatggtcggcctaattgaagatacagcgcacattacaacacagcatttcaaacaagcaggagatctcgtatacgtgatcggcgaaacaaaaccagagtttgccggaagcgagctgcaaaaaatgacagaaggccgtatttacggcaaagcgccgcaaatcgatcttgatgtagagctgtctcgtcaaaaagcactgcttgacgcgattaaaaaaggcttcgttcaatctgcgcatgatgtgtctgaaggcggcttaggcgtagcgattgcggaaagtgtcatgacgacggaaaaccttggcgctaatgtgactgtagaaggggaagcggcgttattattctctgaatctcaatctcgcttcgtcgtttcagtgaaaaaagaacatcaagctgcgtttgaagcaactgtcaaagatgcagttcatattggtgaggtaacagctgacggaattctggcgattcaaaaccaagacggacaacaaatgattcatgcgcaaacgaaagagcttgaacgcgtatggaaaggagctatcccatgcttgctgaaatcaaaggcttaaatgaagaatgcggcgtttttgggatttggggacatgaagaagccccgcaaatcacgtattacggtctccacagccttcagcaccgaggacaggagggtgctggcatcgtagcgactgacggtgaaaagctgacggctcacaaaggccaaggtctgatcactgaagtatttcaaaacggcgaactcagcaaagtaaagggaaaaggcgctatcgggcacgttcggtacgcaacggctggaggcggcggatacgaaaatgttcagccgctcctcttccgttcccaaaacaacggcagcctggcgcttgctcataacggaaatcttgtcaacgccactcagctgaagcagcagctcgaaaatcaagggagcatctttcaaacctcttcggatacagaggttttggctcacctgatcaaaagaagcggacacttcacgctgaaggatcaaattaaaaactcgctttctatgctgaaaggcgcctacgcgttcctgatcatgaccgaaacagaaatgattgtcgcacttgatccaaacgggctgagaccgctatccatcggcatgatgggcgacgcttatgtggtcgcatcagaaacatgcgcatttgacgtcgtcggcgcaacgtaccttcgcgaggtagagccgggagaaatgctgatcattaatgatgaaggcatgaaatcagagcgtttttccatgaatatcaatcgttccatttgcagcatggagtacatttatttctccagaccagacagcaatattgacggtattaatgtgcacagtgcccgtaaaaaccttgggaaaatgctggctcaggaatccgcagttgaagctgacgtcgtaaccggggttccggattccagtatttcagcggcgatcggctatgcagaggcaacaggcattccgtatgagcttggcttaatcaaaaaccgttatgttggcagaacgtttattcagccgtcccaggctctgcgtgagcaaggcgtcagaatgaagctgtctgcggtgcgcggggttgtagaaggcaaacgcgtcgtgatggtggatgactctatcgtgcgaggaacaactagccgccggattgtcacgatgctaagagaagcgggtgcgacagaggtgcatgtgaaaatcagttcaccgccgatcgctcatccgtgcttttacggcattgacacttccacacatgaagaactgatcgcgtcttcgcattctgttgaagaaatccgtcaggaaatcggagccgataccctctcatttttgagtgtggaagggctgctgaaaggcatcggcagaaaatacgatgactcgaattgcggacagtgtctcgcttgctttacaggaaaatatccgactgaaatttaccaggatacagtgcttcctcacgtaaaagaagcagtattaaccaaataaaacttgaaaaatgacataaaggcagcgcagttcggctgcctttctctttctgccctcgttcggggagatattttgaaaagcgccttaaaggagtgaataggatgtctgaagcatataaaaacgcaggagttgacatcgaagccggatatgaagctgtaaaacgaatgaaaaaacacgtggagcgcacgaaacggcttggcgttatgggcagccttggcggttttggcggcatgtttgacctgtctgagctttcttatcaaaaaccagttctcatttcgggaacggacggtgtcggcacaaaattaaagctcgctttttccatggataagcatgacacgattggcgtggatgctgttgcaatgtgtgtcaatgacgtgctggcacaaggtgcagagccgctgtttttcctcgattatttagcggttggcaaagcggacccagtgaaaattgaacagattgtacaaggtgttgcggaaggctgtgagcagtcaggttcagccttagtcggcggtgaaacggctgaaatgccggggctctatacagctgatgaatacgatattgccggtttctcagtcggagtggcagaaaaggacgaaatcgtgactggagaaaaaattgaagagggccatctgttgatcggcctcagctccagcggccttcacagcaacggcttttcccttgtcagaaaagtgcttctggatgatgcggagctggacctcgatacaacatatgagccgtttgaacgcccgcttggcgaggaattgcttgaaccgacaaggatttacgtgaagcctgtgcttgccgcggtcaaaagcggaaaaatcgacggcatggcgcacgtgacaggcggaggatttattgaaaatattccgcgtatgcttccggaaggcttaagtgcggaaattgatcatggctcatggccgatcccgccgattttttctttcttgcaagagtacggcaagctaaaggaagaagacatgttcaacgtctttaatatgggtatcggttttgttttggcagtcaaagaagagcatctgacagatgtgatcggaacgcttgaaagccatggcgaaaaagcctatttaatcgggcgtgtgaaaaaaggtgaaggcgtcacattcggcggtgcggcactttcatgaaaaagtttgcggtatttgcatcaggaaacggttcaaacttcgaagccatcgtcacgcgtttgaaggaggagaactgggatgcgtcagcagcgctcctcgtttgcgacaaaccgcaggcgaaagtcatcgaacgggcggaagcattccacattccatccttcgcatttgagccgaagtcttatgaaaacaaggctgcatttgaacaagccatcattgaacagcttcgtcttcacgaggttgaattgattgctcttgccggctatatgaggctgatcggtgatacgctccttcaagcatatgggggaaaaatcattaacattcacccatcgcttcttccggcgtttcctggaatcgacgcagtcggacaggcgttccgggcgggtgtgaaggtggccggaatcaccgtgcattatgtcgatgaaggaatggatacaggtccgatcatcgctcaaaaggcaatcgaaattgatgaacatgatacattggaaacaatcgaacagcgaattcacaagcttgagcataaatggtatccgagtgtgattaaacagctattaggattaaataacagaggtgaaaaggcatgaccattaaacgtgcattaatcagtgtttcagataaaacaaatctcgttcctttcgtaaaagaactgacagagcttggcgttgaagtcatctccacaggcggaacgaaaaagcttcttcaagaaaacggtgtggatgtgatcggaatttctgaagtgacaggctttcctgaaattatggacggccggttaaaaaccctacacccgaatattcacggcggccttctggcggttcgcggcaatgaagagcatatggcgcagatcaatgaacacgggattcagccgattgacctcgttgtcgtcaacctctatccatttaaagaaacgatttctaaagaagacgtcacgtatgaagaagcgatcgaaaatatcgacatcggcggacctggcatgctgcgcgcggcatcaaagaaccatcaggatgtcacggttatcgtcgatccggccgattacagcccagtgctaaatcaaatcaaagaagaaggcagcgtatctcttcagaaaaaacgcgagctcgcggcaaaagtattccgtcatactgcggcatatgatgcactgatcgctgactatctgacaaatgttgtcggtgaaaaagaaccagagcaattcactgtgacatttgagaaaaaacaatcgcttcgctatggagaaaacccgcatcaggaagcaactttctatcaaacagctcttcctgtcaaaggctccattgcgcaagcagaacagcttcacggaaaagagctttcttacaacaacattaaagacgcggatgctgcagttcaaatcgttcgtgaattcactgaaccggctgctgttgctgtgaagcatatgaacccgtgcggcgtgggaacaggaaaaacgatcgcagaagcgtttgacagagcgtttgaagcggataaaacatctatcttcggcggcattatcgcgctgaaccgtgaagtggacaaggcaactgccgaagcgcttcacaacattttcttagaaatcatcattgcgccttcattcagccaagaagcgctcgacgtcctgactgcgaagaaaaatctccgtctgctgacgcttgacgtatccgccgctgttcaaaaggaaaaacagctgacatccgttcaaggcgggctgctgattcaagatttagatatgcacggcttcgatgatgctgagattagcattccgacaaaaagagagccgaacgagcaagagtgggaagacttgaagcttgcttggaaagtcgtgaagcatgtgaaatcaaatgcgattgttctcgcgaaggacaacatgacagtcggcgtgggagcaggccaaatgaaccgcgtcggatcggcaaaaatcgcaatcgagcaagcaggggaaaaagcgaagggcagcgcgctcggttcggatgcatatttcccaatgccagatactgtcgaagaagcggcaaaagcgggcgttacagccatcattcagccaggcggatcgatccgagatgaggattccatcaaaaaagcggatgaatacggcattgccatggtattcaccggcatcagacacttcaaacattaaggggatgaaaacgacgtgaatgtattaattatcggtaaaggcggaagagaacatacgctggcgtggaaggcagcgcaaagcagcctcgtcgagaatgtatttgccgctcccggaaatgacggcatggcagcttccgctcagcttgtaaacattgaggaaagcgaccacgcagggcttgtctcatttgcaaaacaaaatcaggtcggcctgaccattgtcggccctgaggttcctttaattgaaggtctggtggatgaattcgaaaaagcgggcttacatgtgttcggtccgtcaaaagctgcggcgatcatcgaaggaagcaaacagttcgctaaggatttaatgaagaaatacgacattccgaccgcagaatacgagacgtttacatcctttgatgaggcgaaggcatatgtgcaggaaaaaggtgctccgattgtgataaaagcagatggacttgcagctggaaaaggcgttactgtggctatgacagaggaagaagcaattgcgtgcttgcatgactttcttgaagatgaaaagttcggtgatgcgagcgcgtccgttgtcattgaagaatatctttctggtgaagaattttctctaatggcctttgtcaaaggggaaaaggtgtatccgatggtgattgcccaggatcacaagcgggcgtttgacggagacaaaggcccgaatacaggcggcatgggcgcctactcgccagttccgcaaatttcggaagaaacggtccgccatgctgtagaaacgatcgttaagccggctgcaaaagcaatggtacaagaaggccgttccttcactggcgttttgtacgctggattgatgcttactgaaaacggctcgaaggtcattgaatttaatgcccgtttcggcgatccggaaacacaggtcgtgcttccgcgcatggaatctgatctggtacaggtgcttcttgatcttttagatgataaggaagttgacttaagatggaaggataccgcggcagtgagtgttgtgcttgcatcagaagggtatccggaaagctatgcaaaaggcacgccgatcggcagccttgcagcagaaactgagcaggtcgtggtcttccatgccggaacgaaagcagaaggtggagagttcgttacaaacggggggcgcgtcgccaatgtgacggcttttgatgaaacgtttgaagcggctagagaccgagtgtacaaagcggttgatgaaattttcaaaccgggactctttttcagaaaagacattggggcacgcgctttaaaggctgcccaaaaataagtgaggaaaacccgcagaatagctgcgggttttttgttatcaaaaagcgggatggcagctagaagaagaaagcacaacgagcgtggttggttttccatgggccatcgaggtgtcaataaaatcctcaagcgtatgtaccgattcagtcacgacctttgtcacatagctgtacatccccgtgatgcggtggttttctgctacatcaggatgcgatgttgcaaaggcggcgtagtgcttgcagcttttcggctccatgagaataaaagcggtgacatgcttgtttagtttttcgtaacagatattcgcgctgtagccggtaatcactcctttgtcttccagcttcctgacacgctccgccgcgcttggcgagctgagtccgacaagctttcccagctcaaccatcgttaatctgccgtttcgctgcaaatgcgagagaatctgaaggtctgtatcgtccatttgtctggctcctttacatatttaggcgaatgaatgaaaattcctttgatcgtaaggtaatgctgttgatttaacttcattgtagcatatggatgccgtcttattttttctataataaagccatcaatcagagagggggcatcatgttgccagaattgcagcgctctattacttggatacaagggacggcgttaacgattggggcggttttaggatgcgggatattaatcctgccgtctgtcaccgcggacacggccggccccgcttctttatttgtttgggtgttcatgtccttcttatccttttttcttgtcggcacgctggcccggcttgtgaaaatagcgcctagcgcgggaggaatcacggcttatgtgcagctggcctttcagaaaaaagccggggctattttgggctggatcatgttagggtccgttccgatcggcgttcccatcatcgctttgactggcgcgcattacgtcagttacatcacagaggcggccgattggcagattacattgattgctggttgcatgctggctatatctattttgcttcatatgagagggattcaactatcagcaaacattagtacactcgttatatgtgtcatcgtatttctgcttgtcacttctattgctgtgtcattgccacacgtcacgatagcagaattcaagccgtttcttccgcatggctggtctgccgctggatctgtttctgttatgatttttttctcttttgtaggctgggaaatgattaccccgttggctgaggaatttcatcgtcctgaaaaagatgtcccgctcagcttgtttttggcagcgtcttgtgtggcggggctgtatatcatgctgtcatttgtgaccgtgggtactcattcatatggagagaatggagaaattgcatcgcttgccatgctcatttcaaaaggagcaggagaaagcggtgtatatgtcacggtatgtttagcgctgtttattacattcgccaccatccatgccaatattgccggtttttcaagaatggtgtacgcattggcgagagaggggcacatacccgtattttttggaaaactcagtgcgacaaaacgtacgcctattcgcgttttgacagcgatggccgcagtgtttggcttagtgcttgcagcgcatggtctgtttcaaatcgatttgacgactctgttgaaagggccgagcgcggcttttatcgcatcttacatatgtacaatggcggcagcactgaaactgctgggcaggagagatataggctggtggatggcgctcggggcatttgtggcgtgcgcggtgatttattcattcagcggctgggcactgctttatccggcagtgctggcagctgcaggatatttctatatgaaaacaaagggtgggcataaaaaaaagcttgatcacgttttgtgatcaagcttttccatttatccgttttgatgctcgttatttccagaatcgctgtgttgaaacatgtaggtcacaggacagaagcgcaagattcccgaacccgctttcatggcccccataaagatgtaaaagagatgcattctgcaccaaggttttttcgtaaactttgcactggcggctgacataatcgtcaatccgcaggcgattctgaacacggcattgatgagactgatgtttggcttcaaggaaatccgctccttttacttaaaaaagttttttaatcgaaccttcaaaaatttgtaacgtttttatcgtgcgtgatgaggaaggatgtgataccatgagtctaatacatgtaaaggagagtatgtgaatgtccgaacgcacctttaactggaaaaacaaagacatcagggcacaggttgatgttgtagactcaaagctgcttccaacgctccttttacggaatgctctcgtcttaaatccatatgtaaaacaatggctgaaaaaaaacatttggatttatcaggaccgcattgtttatgtgggtcatgaacttccgaatagagccgaagaaattcatacgattgattgtgaaggaaaatacattgtgccaggttatattgaaccgcacgcacatccttttcaaatatataatccccaaacactggcggaatatgtgtctcaatacggaacaacgacattcgtgaatgataacttatttttgcttttgcaaagcggaaaaaagaaagcgcttacgattttgaatgaactcaaaaagcagcctgtccagtatttttggtggtcacgctatgacctccagaccgaggttctgaacgaggaccacgtccttccatttgacgtcagaaaacagtggattgaacatccggatgtgattcaaggcggagaaatgaccggatggcctcgcctggtagatggtgatgatttaatgctccactgtatgcaagctacaaagaaacagagaaaacgtattgaagggcattttcccggcgcttctgataaaacgcttacaaaaatgaagctgttcggtgcggattgtgatcatgaagcgatgacaggtgatgaagtgatgagaaggctggaactgggctattatgtttcccttcggaactcttccattcgccccgatgtaagaaaaatcttgcaagagctgcatgagaagggcttccgctattatgaccacttcttttacacgacagatggcgcaaccccgaatttctataaaggcggcatgacaaacgagctgattcgcattgcgttagaagaaggcgtacctgcaatcgacgcctacaatatggcatcatttaatatcgcaaagtattaccaaatggatgattatttaggagttgtcggaccgggcagactggcatcgctaaacatactggaagatccgttaaatccgaatccagtgactgttctgtcaaaagggaccattctgcgtgaaaacggctgtgatttgaaggcgtttacaaagacggactggcacaaaggcggtcttgtcccgcttgagctttcatatgatatgacgatggatgacttgcagttttctatgccgatgggcgtgaaaatgcggaatgcggttattatggagccatatatgattgagatcgacaattcgatggaacagctctcgtttgaccatgatgaaagttatttgacgatgctcgacagacacgggaaatggcgcgtcaatacgatgataaaagggtttgcctcaagcgtgcagggatttgtaagctcctttacgacgacgggcgacattgtcgcgattggaaaaaataaagcggatatgctgctcgctttcgcccgcatgaaagaaatcggaggaggaattgttttagcggagaacggaaacattctgcatgaaatcccgcttgcgctgtgcggctgcgcctcttcggaagcgtatgaagacgtgcttgagaaggaacaaaagctgagagatcttttgactgaaagaggctatgagttttgcgatcctatctatacgctgctctttttgcaaagtacgcaccttccgtatatacgcattacgccaagaggaatattcgacgtcatgaaaaaaactgtactctttccatcgataatgcgttaaaatataaaagagcagggagccgacatatgaaaaaatggatgacagtttgcgcgctgtgtttcgtgttttttctgctggtatcctgccagcagaaggatgctgtcccggatactgcaaagaagctgaaagctcctttaacggggctaaagactgaacagaaagtgactgaacgccgccctgttgctgttgtggtgaacaatcacccgaaggcgaggccgcagtcgggtctgtctaaagccgacattgtcatagaagcgctagccgaagggcaaatcacaagatttctggccattttccaaagccagatgcctgaaactgtcggacctgtgcggagcgcgcgggaatatttcgtcactctcagcaatggctttgacagcatatttgtccatcacggctggagtcccggcgccaaaaagcagctggaatccggagctgccgattatatgaacggattggattttgacggaagcttattttggagagctgatttcagcaaaccgccccacaattcctatacgtcttatgattacataaaaaaggcggcagaacaaaagggttataagctgaagcaggaaacaaatccgctgctgtttcaaacatcagatgcaaaacctgcaaatgaatcttacaatgttcgggtagattatggaacaaataacgttacaaatcttgtcgaatacaactatgataaaaaagctgaattttatacaagaagctctgatggtgtcataacgacagaccgggaaaccggaaagccggttgcaatgcaaaatattttcattgttgaagccagccatcatattattgatcaagatggaaggcgggacatcgacttggaatcaggaggaaaaggtctgttgtttcagcacggaaacgtcattgaaacagactggaaacaagtgaatggcagaattgtgccggtaaaagacggcaagtggcttccgtttgtgccaggaaagacttggatcaatatcgtacctgatcttgatgcggcttccattagtaaaggagaaggtgtgtaacgatgcaaatcgataaattacgcggcaaagagctggaccagttatttaactcgatcttatcgctgaaagacctggaggaatgttaccgattcttcgatgatctatgcacaattaacgaaattcaatcgctggctcagcgccttgaagtggcgcgcatgcttcgcgaaggaaacacgtatcataagattgaaacagaaacaggcgcttccacggctacgatttcccgtgtgaaacgctgcttaaattacggaaatgacgcttatgaaatggcgcttgaccgtgtgaaggagacggaaacagagtcttcttccaaataaaaaaccgccctgccgtctggcaagggcggtttctttatgaaacaaattgatggatcaggttgtcgatattgatgatactgccatcctctttccgatagacaacatgctccttggaaaaatgaatcggcgaattaatccctgctgcggctgcaaggttaaatagtccctcgcgcaatgaaataacgtagttgcagacacgatgctgtttttcctcaacgctcagtgctttttgcaatttcggatctgtcgtcgccacacctgccggacaggtgttggtgtggcagacgagagcgcggatgcagccaacggaaaacatcatgccgcgtgcgatgttaacaaagtcagcgccgagggctaaggcgaccgcgattttatcaggagtcaggagctttccggaagcaaagattttcagctggctgcgcaagccgtactgtttaagaagcgtgtccacaataggcagcgctgtcataatcggaaggccgactgtatccgcgagctcgtaaaaggaagctccggtaccgccttcacttccgtcgatcgtgataaaatccggatgctttccgcttttctgcatatgagagaaaagctcatgcaattcttcaggatgccctgcgaccagtttgatgccgactggcttttgtccgacatctctaagtttttcaataaagtcgagcatttcaggagggtttgagaattcataaaagcggttcgggctgtcaatcgactttccaggttcgacattccgaatgtctgccacttcctctgatactttggcgccgtccacatggccgccgcgggttttcgctccttgtgccagctttagctcaaacgctttaatctggtcaatcctgctttttcttttaaattcctcccacgaaaattccccgtttcttttgcgcacgccgaataggcccggtccgatttggcaaatgatatcggcgccgccctttaagtgatattcagacaatcccccttcacctgtattcatccaggtgccgcctgccagatggagcccttttgagagcgccgtaacagcccgttctccaagagaaccgtagctcatggcagactggccgactaagcccttcacataaaatggcttctcgcatgtatgctcgccaatcacctgtacatcatcaggatggagaaaatacgggtctgccttgatatgttcggcatgctccttgcgtttgaacagattgtcagcatccattttatagatttgggtttcaatttttggcgtttgatttacatgcatttcttccctttgttttggaaacatagcgttacggatataatagccaggtttatcaaaatctcttacagatccaaagcccatcattctgcttttgtatttgccggagatgacggtttgctcatattcctttcgtgaaaatggctgctcttcattgtcattgctgtataaatactgtctgagctccggcccgattttttcaaggatataccgaaaccttccgatgacgggatagttgcgaagaattgagtgctcctgctgtttttcatcctttatgtagatccaggcaaacaagacgatcgggatagcgatgatcccaatgataaatgcgatgagtgctattatgatggtttccatctctcagcctccctttttatgtaaccatttccacagtagaacactttccaaacaatagcagaaggaatctggtgaaaaatgtgtgctcctgccgatacaggactcaccatgcaggtactgccatatgctctctttttttatgaaaaaagaatcaaaacacctttttcagtgaataacgagattaacggctttttccgtttttccgcgctatgtgaatttgttataatgtttaaatggtaacaaacgaatggaggaacgtatgacgtgtacgatgtaacggagtggaagcatgtctttaaactcgatccaaataaagatttgcctgacgaacagctggagattctttgcgaatcaggaacggatgcggtcattatcggaggaagcgatggtgtgacagaggataatgtcctgcggatgatgtctaaggtaagacggtttttggtgccgtgtgtcctagaggtatcagcgattgaagcgattgttcccggctttgacttatattttattccgagtgtattaaacagcaaaaacgcggattggattgtcggaatgcaccagaaagccatgaaggaatacggagaactgatgtctatggaagaaatcgtggcggagggctactgcatcgcaaatccagattgcaaagccgcggcactgactgaagcggacgccgatctgaatatggatgatattgtcgcctatgcgcgtgtgtcggagctgctgcaactgccgattttttatttagaatacagcggcgtgcttggagacatagaagctgtcaagaaaacgaaggctgtattggaaacgtccaccttgttttacggcggcggcatcaaggatgcggaaacggccaagcagtacgcagagcatgcggacgtgatcgttgtaggcaatgcggtgtatgaagattttgacagggctttgaaaacagtagcggctgtgaaaggcgagtagtaaattgtacggatttggtttatgatagaacgtatgttttgtataggcgggtgaacaaattttgaattatattagcaatcaattactaagcggtttaaaccccgttcagcaggaagcagtcaaaacaacggacgggcctcttttgctgatggcgggagcgggtagcggaaagacgcgtgtcctgacccatagaattgcttatttaatggcagaaaagcatgtggcgccgtggaacattctggcgatcacatttacaaataaagcggcacgcgaaatgaaagaacgtgtggaaagcatcctcggacccggcgcggacgatatctggatctccacattccacagcatgtgcgtgcggatcttgcgcagagatatcgaccggattgggatcaaccgaaatttctccatccttgatacggctgaccagctttcagtgatcaaggggattttgaaggagcgcaatcttgatccgaagaagtttgacccgagaagcatcctcggcacgatcagcagtgcaaaaaacgaattgaccgaaccggaggaattctctaaagttgctggcggctactacgatcaggtggtcagcgatgtatatgctgattatcagaagaagctattgaaaaaccagtcgctcgatttcgacgatttaattatgacgacgattaaactgtttgacagagtgcctgaagtgcttgaattttatcagcgcaaattccagtacatccacgttgatgagtatcaggatacgaacagggcacaatacatgctcgttaagcagcttgccgagcgtttccagaacctttgcgttgtgggggattctgatcagtcaatctacagatggcgcggcgcggatatcaccaacattctttcatttgaaaaagattatccgaatgcaagcgtgattttgctagaacaaaactatcgttcaacgaaacggattttgcgcgcggctaacgaggtcattaaaaacaactctaaccgcaaaccgaaaaatttgtggacggaaaatgatgaaggcatcaagatttcctattatcgcggtgataatgagttcggtgaaggacagtttgtggccggcaaaattcatcagcttcacagcacaggcaagcggaagctgtcggatatcgccatattataccggacaaacgcgcagtcccgtgtgattgaggaaacgcttctcaaagcgggcttgaactataacattgtcggcggcacaaagttctatgacagaaaagaaattaaagacattcttgcgtacctgcgcctcgtatccaatccggatgacgatatcagtttcacgcgcattgtcaatgtgccgaagcgcggagtcggcgcgacatcacttgaaaaaatcgcttcgtatgcggccataaacggcttgtcctttttccaagcgattcagcaggttgattttatcggcgtcagtgccaaagcggcaaacgcgcttgacagctttagacagatgattgaaaacctgaccaatatgcaggattacttatccattacagagctgacagaagaaattcttgataagacggaatacagagaaatgctgaaggctgagaaatcgatcgaagcccaaagccgtttagaaaatatcgacgagttcctgtctgttacgaaaaactttgaacagaaaagtgaagacaagacactcgttgcgttcctgacagacttggcattgatcgcagatattgatcagctcgatcagaaggaggaagagtcaggcggcaaggatgcgatcaccctgatgacactgcacgccgcgaaaggactggagtttccggttgttttcttgatggggcttgaagaaggcgtcttcccgcatagccgttcactcatggaggaagcggaaatggaagaagaacgccgccttgcgtacgttgggattacaagggcggaacaggagctttatctgaccaatgctaaaatgcgcaccttgtttggccggacaaatatgaacccggaatctcgcttcattgctgaaataccggatgatttattggaaaacctaaatgagaaaaaagaaacaagagcgacgtctgcgagaaaaatgcagccgagacgcggccctgtttcacgcccggtatcctacgccagcaaaacaggcggcgacaccttgaactgggcagtcggagataaggcgggccataaaaaatggggaacaggaactgtcgtcagcgtgaaaggcgaaggagaagggacagagcttgatattgccttcccgagccctgtcggcgtgaaacgcctgttagcagcatttgctcctattgaaaagcagtaattgaagaggaaaggaagaagcagatggacaaagaaacagcgaagcagcgggcagaagaactgcgccgcaccatcaacaagtatagctatgaatattacaccttagatgaaccgagcgtcccagatgccgaatacgacagattgatgcaggagctgatcgcgatcgaggaggagcacccagacctcagaacgcctgactctcctacgcagcgcgtcggcggagccgtgcttgaagcgtttcagaaagtcacccacggcacaccgatgctcagtctgggcaacgcctttaatgctgatgatcttcgtgatttcgaccgccgtgtgcgccagtccgtcggcgacgatgtggcgtataatgtggagctgaaaatagacggtcttgctgtttctctccgttatgaagacggctattttgtcagaggggccacaagaggtgacgggacgacgggagaggatatcacggagaatctgaagacgatccgcaatatcccccttaaaatgaaccgtgagctgtcgatcgaagtgcgcggcgaggcgtatatgccgaagcgttcgtttgaagcactcaatgaggaacggattaaaaatgaggaagaaccgttcgccaatccgcgaaatgccgcggcgggatctctcagacagctcgatccgaaaattgcagcgaaacgaaacctcgatatcttcgtctacagtatagcggagcttgacgagatgggtgtagagacgcaaagccaagggcttgattttctcgacgaactcggatttaaaacgaatcaggaacgaaaaaaatgcggcagcatagaagaagtcattacgctgatcgatgagcttcaggcgaagcgcgcggacctgccgtacgaaatagacggcattgtcattaaagtcgattctctcgatcaacaggaggagctcggttttacggcgaaaagcccgcgctgggccatcgcgtataagtttcctgctgaagaggtcgtgacgaagcttctcgatatcgaattaaatgtcggcagaacgggtgtgattacgccgactgcgattcttgagccggtaaaagttgccggcacaacggtctcaagagcatcccttcataacgaagatttaattaaagagaaggacattcggattttggataaggttgtcgtcaaaaaagcgggcgatatcatcccggaagttgtgaatgtcctcgttgaccagcgcacaggagaagaaaaggaattcagcatgccgacggaatgtcctgaatgcggcagtgaactcgtccggatcgaaggagaagtggcgcttcgctgcattaaccctgaatgtccggcgcaaatccgggaagggcttatccatttcgtttcccggaatgccatgaacattgatgggctcggcgaacgagtgatcacacagctgtttgaggaaaaccttgtccgcaatgtggcagatttatataagctgacgaaggaacgagtcatccagctcgagcgcatgggcgaaaagtccactgaaaacctgatcagctccatccaaaaatcaaaagaaaattcgttagagcgcctgctgtttgggcttggcatccgttttatcggatcaaaggccgcaaagacgcttgccatgcattttgaaagcttggagaacctgaaaaaagcctctaaagaggaacttctcgcggtagatgaaatcggtgaaaaaatggctgatgctgtgatcacctattttcataaagaagaaatgcttgaactcttgaatgaacttcaggagctgggcgtaaacacgctctacaaaggcccgaaaaaagtaaaagcagaggacagcgactcttactttgctggtaaaacaattgttctgacaggaaagctggaagagctgtcaagaaacgaagccaaagcgcaaatcgaagcgctgggcggaaagctgactggaagcgtcagcaaaaacacagacttagtcatcgccggagaagcggcgggaagcaagctgacaaaagcacaagagctgaacattgaagtgtggaatgaagaacagttaatgggagagctaaagaaataagaggagtgttttctattgaaaaagacgttggcattggcggcaacggcggcagtattaatgctgtctgcctgctcgtcaggtttcggggggagaaggaggaagagattacgcaaaagacggcgaaatcgtcagaaaaagcgattgtcccgaaatataatatctctgactcctattacaaaatggtgctgccgtttaaggcaggcaaagcgcgcggcttaacaacggaacagctgaatacaaggctggacattgacgaatttgaaacagggctgatgcgccttgcccaagattctttctcaactgacgattatctgttccaagaaggacaatatttagatgaggatacagtattaagctggctggcacggaaaaaaacgggctctgatttgaaaaaagccgaaaaagaagataagaacttcaaaaatgaaggcttgaacccggcgctcccgagttctggttcaacagaagaaaagaacgaaagcagcccaatttatttagcatccatgcttgagcacgattatttagtcagaaaagacaagaattctatccagcttggcggcgtcatgatcggactggcgttaaactcagtgtattactatcgtgaaaaaactggcgacccgcaaaaagaagtggagattaaagacagcacgcttcgccagcagggagaaaaaattgcacaggaggttattaaccgcctccgcaaaaaagataacttgaagaatgtgccgattaccgtggcgctctacaagcaggcgtcaaaaacatcgattgtgccggggaacttcatcgccaaaacagaggtcaaagcaggctctactgatatctcaaattgggatgacatcaatgaaaaatatgtattctatccggcggatacaaccacagcagaaaagtacccggatgacaccgaggtctttaagcggttcaaaaactcaattgaagaatatttcccgaactatacaggcgttgtcggtacagcgctgtatgaaaatgatgaaatgaagaaaatgaagattgacataccaatgcaattctacggaaaaagtgaagttgtcgcgtttacccagttcttaacgggtgaagtgatggactactactctaagagctcagttgatgtcgaagtcaatatcacgtcctcagacggacaggaagcggtcattatccgcaatgccggagataaagagccgactgttcacatttatgactgatagaaaacccttgtgccatattggcacaagggtttttatgttacaattaacaggaaaagggaaaatattttcacttctgccgaaacacaaatcaaggggaggtatgttgatgctggaaatcgtgtgaaaacaatcattatcaaatctatagcaatgaaaggatgttagacgtgcataaagatatcaaaaaaatatttcatgaagagcaggttttggcagaagctgcagcgagatacggtttctcaaaagatcaggtgcgttttctggctgatgcggaaaactatgtatatgaatgtatgaaagacaatcaaccttatattttaaagattacccatacgattcggagatcttctgattatatgatgggagagatggaatggctccgtcaccttgcaatagggggaatttcagtagccaaaccgctcccgtcgctgaacggaaaagacgtagaagcagtgccggacggaaacggcgggtcatttttattgagagtgtatgagaaagcgccggggcaaaaagtggatgaatcggactggaatgaaacgctattttatgagcttggcagatacacaggcagcatgcacagcctgacaaaaagctacaaattgagcaatcccgctttcaaaagacaggaatgggatgaagaggagcaattaaagctgagaaaatatgtgcctgaagatcagataaaggtgtttcagcaagccgattctttgatgaatgaactgcggaggctcccgaaaagccaggacaactacggcttggtgcatgcggatctgcaccatggcaattttaactgggatcatggcaaaatcacggcatttgattttgatgatatcggctacaactggtttgttaacgatattagcattcttctctacaatgtcctgtggtatcctgttgtgccatatgatgataaagctgcgtttacagaagaatttatgacgcattttatgaaagggtactgggaggaaaatgagcttgaccctgcatggctgatgataatacctgatttcctccgccttcgccatatgctgatttacggattgctgcatcagatgtttgaccttaacacaataggagaagaggaaaaagaaatgctggccggtttcagaagagatatagagaatggcacgccgattacagcatttgatttttcagcactggtgtagatagaaaaagccaatgggattccagtcccattggcttttataatgtatcacacttcacgccgactacgccttcaatggctttaatgtcatagtagacatcggtcgtgtatctgtttttatggacgcggaccttcacttccataattggaaaatccttttcgcctaggtcgtcgatccgaacggagtgtgctttgatatctcttcttttcatttcttttaaaatctctgtcattttgtctttatcagaaagtgacattctgatgcggatgtctttttcctgcaggcggtcggggccgatttttctgaccacccatgggagaaattccacactgatcaggatgaacagaagactggcaaacgcttctttataaaaaccggctcccgtagcaagcccgagccccgctgcccccagatcatggccgatgtcgtcaggccggaaatgacatcattgctttttcgcaggatgacaccggcgccgataaacccgacgccggagatgatttgtgccggcagacgaagcggatccatcatgatgcggtagtatttagggaaatgatatgccgcattaatactgacgatcgtcagcatgcatgagctgactgcgatgacaatacaggtttttaatccgagcggcttattttttaattcgcgttcaagcccgatgaccatgccaatcaatgtggcaatgcccaatttcaataaaatatcaggatcaatataccagctcaacagcaaacttcccccttctctatggtgtttttaaataaatatgattttctcacagtatttatagcaaaacaagagcacaaaagccaccaagctgcgcttgatggcttattgcttactttttgcgttttaacagcttttccatgacaccgaataatcggtaagaggcttttgcaggacgttttgtgatcatgctgacaatgatgccggcaatcatactgagaataaacccagggatgatttcgtacacaccggttgattttgccaggccggttgtaatccagatcaacacggtcgcagccccgacaatcatggcagcaagcgcgccccattcgttcattcgtttccaatacagactgagcagaatcgcaggcccgaaagctgaaccgaagccggcccaagcgtatccgaccaaatcaagaatggtgctgttcgggttcaatgacaagagtaccgcgataacggcaatgactaagacggacaatcgcccgatcatgaccaattctttatcagaagcttttcgtctgaaaaatgaccggtataaatcctctgttacagcacttgctgtgaccaagagctgtgaggaaatcgaactcatgatggcagccaaaatagctgacaataagaaccctgtaattaatgggtggaacaagattttagagaagataatgaaaatcatctccggatcttttacagcaactccgaatttatgggcgtatgcaacaccgattaaacccgtcagcacggaacctagaactgtaatgatcatccagctcatgccgattcggcgtgcaggttttaaatctttaatgtctttaatggccataaatcggacgatgatatgaggctggccgtagtagcccaacccccaggctaaataggaaataatgctaatgacgctcgcgcctttaaaaatatccaataaatgtggattaacagcgtcgatttcatggaaagtcggagcaacgccgcccacatgggtaaaagcaacgatcggcacaagcactagtgctgcaaacatgatcgcaccctgcacgaagtcagtcagactgacagcaaggaaaccgccaaacagtgtgtataacacgacaactgcggtggtcagaaacaggcctaatttgtaatccgcaccaaaagcagattcaaacagccgtccgccagataccataccggaagaggtatacaatgtgaaaaagatcatgatgatcaatgcagatacgattttcagcagtgatgaagaatgctggaatcgtttatcaaagaaatcaggaattgtaatcgcatcatctgccgcttctgtataagcacgcagccttggagccagcagcaagtaatttgagtacgccccgattgtaagacctaaagcaagccataaggtggacagccctgtcgcaaacatcgcgccgggaacacccatcagcatccatccgctcatatcggccgcgccggcagacaaagcagtaacgaatggtccgaggcctcttcctccaagcatgtaatcattgatgtcagtggttttcttgaatgcataccagccgattaacagcatggcaataaagtaaattcctaaagatataataatttcaatactcacgttttaccctctcttcatttctaataatgttgcatcacctctcaaattgatggtgccagttaagcagcctggcgtaagtgcaaaacaaaagaaattcttttgcgggtgcacttggtaacttaacctaacaaagtattcccggccattcaagcgatgaaacattgatcataagctggaaataccgttgcaaacctagaagggaataaagaataaaacgctttcaaaaaataattaaagtaaaaatattcagaaaaatatttcgtttctccttctcctcattttagtataaaatatatagggtattgtttcgaaaacacaggcctgtctcaaggcgttttgttgctttaaagggcttgtttttgatatgatcagtattatatgacttaacggagaaatatgtggaggtggatcatatgtcacgaatttcaatagaagaagtaaagcacgttgcgcaccttgcaagacttgcgattactgaagaagaagcaaaaatgttcactgaacagctcgacagtatcatttcatttgccgaggagcttaatgaggttaacacagacaatgtggagcctacaactcacgtgctgaaaatgaaaaatgtcatgagagaagatgaagcgggtaaaggtcttccggttgaggatgtcatgaaaaatgcgcctgaccataaagacggctatattcgtgtgccatcaattctggactaaaggagggacacaagaatgtcattatttgatcataaaatcacagaattaaaacagctcatacataaaaaagagattaagatttctgatctggttgatgaatcttataaacgcatccaagcggttgatgataaggtacaagcctttttggcattagatgaagaaagagcgcgcgcatacgcgaaggagcttgatgaggcggttgacggccgttctgagcacggtcttcttttcggtatgccgatcggcgtaaaagataatatcgtaacaaaagggctgcgcacaacatgctccagcaaaattctcgaaaactttgatccgatttacgatgctactgtcgttcagcgccttcaagacgctgaagcggtcacaatcggaaaactgaacatggacgaattcgccatggggtcatctacagaaaactcagcttacaagctgacgaaaaacccttggaacctggatacagttcccggcggttcaagcggcggatctgcagctgcggttgctgcgggagaagttccgttttctcttggatctgacacaggcggctccatccgtcagccggcatctttctgcggcgttgtcggattaaaacctacatacggacgtgtatctcgttacggcctggtcgcatttgcgtcttcattggaccaaatcggaccgattacacgtacggttgaggataacgcgtttttacttcaagcgatttccggcgtagacaaaatggactctacgagtgcaaatgtggacgtgcctgattttctttcttcattaactggcgacatcaaaggactgaaaatcgccgttccgaaagaataccttggtgaaggtgtcggcaaagaagcgagagaatctgtcttggcagcgctgaaagtccttgaaggtctcggcgctacatgggaagaagtgtctcttccgcacagtaaatacgcgcttgcgacatattacctgctgtcatcttctgaagcgtcagcgaaccttgcacgctttgacggcatccgctacggctaccgcacagacaacgcggataacctgatcgacctttacaagcaaacgcgcgctgaaggtttcggaaatgaagtcaaacgccgcatcatgctcggaacgtttgctttaagctcaggctactacgatgcgtactacaaaaaagcgcaaaaagtgcgtacgttgattaagaaggatttcgaggacgtatttgaaaaatatgatgttattgttggaccgactacaccgacacctgcgtttaaaatcggtgaaaacacgaaggatccgctcacaatgtacgcaaacgatatcttaacgattccggtcaaccttgccggcgtaccgggaatcagtgtgccatgcggattagcagacggacttccgctcggcctgcaaatcatcggaaaacactttgatgaaagcactgtataccgcgttgctcatgcatttgaacaagcaacagaccatcataaagcaaaacctgaactgtaaggggtgaaaagaattgaactttgaaacggtaatcggacttgaagtccacgttgagttaaaaacaaaatcaaaaattttctcaagctctccaacgccattcggcgcggaggcgaatacgcagacaagcgttattgacctcggatatccgggcgtcctgcctgttctgaacaaagaagccgttgaattcgcaatgaaagccgctatggcgctcaactgtgagatcgcaacggatacgaagtttgaccgcaaaaactatttctatcctgacaacccgaaagcgtatcagatttctcaatttgataagccaatcggcgaaaacggctggatcgaaattgaagtcggcggcaaaacaaaacgcatcggcatcacgcgccttcatcttgaagaggatgccggaaaactgacgcatacgggcgacggctattctcttgttgacttcaaccgtcaaggaacgccgcttgttgagatcgtatcagagccggacatccgcacgccggaagaagcgtacgcatatcttgaaaagctgaaatccatcatccaatatacaggcgtttctgactgtaaaatggaagaaggctcacttcgctgtgacgccaatatctctcttcgtccgatcggccaagaggaattcggcacaaaaacagaattgaaaaacttgaactcctttgcgtttgttcaaaaaggccttgagcatgaagaaaaacgccaggagcaggttcttctttccggcggcgtcatccagcaagaaactcgccgttatgatgaagcaacgaagaaaaccattcttatgcgtgtcaaagagggatctgacgactaccgttacttcccagagccagatctagtcgagctctacattgatgatgaatggaaggaacgcgtaaaagcaagcattcctgagcttccggatgagcgccgcaagcgttatatcgaagagcttggcttgcctgcatatgacgcaatggttctgacgctgacaaaagaaatggctgatttcttcgaagaaaccgttcaaaaaggcgctgaagctaaacaagcgtctaactggctgatgggtgaagtgtcagcttacctaaacgcagaacaaaaagagcttgccgatgttgccctgacacctgaaggccttgccggcatgatcaaattgattgaaaaaggaaccatttcttctaagatcgcgaagaaagtgtttaaagaattgattgaaaaaggcggcgacgctgagaagattgtgaaagagaaaggccttgttcagatttctgacgaaggcgtgcttctgaagcttgtcactgaggcgcttgacaacaatcctcaatcaatcgaagactttaaaaacggaaaagaccgcgcgatcggcttcctagtcggacagattatgaaagcgtccaaaggacaagccaacccgccgatggtcaacaaaattctgcttgaagaaattaaaaaacgctaataaaaaagcagcccttagaggctgctttttttatggtcaaattgagataaagacaagatgagggcccgaagcctttcaacttctttgtcgttggttccggccaaattggacagcatgcctttaataatcggcttgcgcggtttatcctgagtcaattcttcctcgataacatcaagtgacacggtgatatcctcgggcagcgtgctgttttctttcactttctgaatgtcctcaagcagctggtcttttcccgcaggcatcgggttaaaaatgtcttttgatacaatcggattgagtgcagaacggctcagcccctgtacaagatcatccagtctctcaataataaaggctgagatttcttctgcatcgatattaagctcaccgttaaataccatcacgttcatataggaatgcacaatgcctcttgccatgatggacagatctgcgacataccgctcgattccttcgccataggataccagcaaggcgttccggtacagcttatccgtctccatggttactttgtaaaagtattgcttgatttcttgattttccggaatgatattttcggtaagcaaaagaacgataaaatctttatgatcgcgaaaatcctcaaattgagcgccaatttgcttttttaacacttccttaggcggctttccggcgagatcttcttctatatttttcattttgttcatagacataccgatataatattcacaggcagataacagcagcgcttctttcgatttgaagtgcaaataaaaagcgcccttcgaaatgccgcattcactggcgatttcttggatcgtcgtagctgcgaatccttttttcgcaaataaacgaatgctggtttttatgattctctcttttttttcattcatgacgtgcttccccttaatccttgaaaaatttagtaaaattttctggtatatgagttgacgttgttgcgttataacgtttagtattatatagaatgaccagtcagtcaataaaaaatgtaatggaggatatgatgaaccacgttattaatttcgttctgaaaaacaaattcgccgtatggctgatgacgattattgtaacggcagccggcttgtatgcgggtatgaatatgaagcaagagtctattcctgacgtgaacatgccttacttgacgatcagcacgacatatccgggtgcaacaccaagccaagtggctgatgaagtgaccaaaccggttgaacaagccgtacagaacttggacggtgtcagcgttgtgacgtcgacgtcctatgaaaacgcatcgtcggtcatgattgaatatgattatgagaaagatatggacaaagcgaaaacagaagcagctgaagcgttagaaaacgtcaacctgcctgatgacgcgaaggatccggagatttcacgctacagcttgaactcattcccgattctgacgctgagcgtgtccagtgataaagataatctgcaagagctgacgaaacaagtggaggacagcctcgtttctaagcttgaaggcatagaaggcgttgcgtccgtccaagtatcaggccagcaggtggaagaggttgaattctctttcaaagaagacaaactgaaggaatacggccttgatgaagatacagtcaagcaagtgattcaaggttcagatgtgacaactccgcttggattgtacacattcggaaatgaagaaaaatctgtcgtcgtcagcggcgatattgaaacaattaaagatttgaagaatatgagaatcccgacggcatctgcttcaagtgcaggcagcagcgcagcatctcaagcaggtgcgcagagtgctcaagcagcccaaagcgcgcaagcggcagcacaggtgcagcaaagcgcaagcacagcagtgccgacggtcaagctttctgacattgctacaattaaagatgtgaaaaaagctgaatccgtttcacgcacaaatggcaaagacagcatcggcatcaacatcgtcaaagcaaacgatgcgaatacggtagaggttgccgacgatgtcaaagctgagctgaaaaagttcaaagaagaccataaaggcttcaattacagcgcaactctcgacatggcggagccgatcacacagtcagttgacacgatgttaagcaaagccatcttcggtgctatttttgcgattgtgattattctcttattcttaagagatatcaaatcaacattaatttctgttgtttcaattccattatcattgctgatcgcactccttgtgctgcagcagcttgatatcacattgaatattatgacgctcggcgcaatgaccgttgccatcggacgtgtagtcgatgactccatcgttgtgatcgagaacatttaccgccgcatgagactcaaagatgagccgctccgcggaaaagccttggttcgtgaagcgacgaaggaaatgtttaaaccgatcatgtcatcaacgattgtgacaatcgcggtattcctgccgctcgcacttgtaggcggacaaatcggtgaattgtttattccatttgccttaacgattgtttttgcgcttgccgcatccctagtgatttcaatcacgcttgtgccgatgctcgcacacagcctgttcaaaaaatcattaaccggtgcgccgattaaagcgaaagaacacaaacctggcagacttgcaaacatctataaaaaagtattgaactgggcgctgagccacaaatggatcacgtctatcatcgcggttctgatgctccttggaagcttgttcctcgtaccgttaatcggtgccagctacctgccgtccgaggaagaaaaaacgatgcagctcacatacagcccagaaccgggtgaaacgaaaaaagaagccgaaaatgaagctgaaaaagcggaaaaaatcctgcttgaccgcaagcatgtcgatacggttcagtattcattaggctctggcagcccgcttgccggaggagattctaacggtgcgttattctatatcaaatatgaaagcgacacacctgactttgataaagaaaaagataacgttctgaaggaaatccaaaagcaatctgaccgcggagaatggaagtcacaggacttcagctcttcaggcaataataacgaattaacatactatgtgtatggcgattctgaaaacgatattaaagacacggtcaaagacattgaaaaaatcatgaaagatgaaaaggatctgaaaaacgtaaattcaggcctttccagcacatatgatgagtacacatttgtcgctgaccaagaaaaactaagcaagctcggtttaaccgcgtctcaaatttctcaggccttaatgtcacaaacatcgcaagaaccgctcaccactgtgaaaaaagacggcaaagagcttgatgtgaacattaagacagaaaaagacgagtataagagtgtgaaagatttagagaataaaaagatcacttccgcgactggccaggaagtcaaaatcggcgatgtggcaaaagtgaaagaaggatcaacatcagataccgtgtcaaaacgtgacggaaaagtctatgcagatgtcacaggtgaggttacctctgacaacgtcacagccgtatcagctgctatccagaagaaaatcgataagcttgaccaccctgataacgtatcgattgacacaggcggcgtatcagcggatatcgctgattccttcacgaagctcggtttagcgatgctggcagcaatagcgatcgtttaccttgtgctcgtgattaccttcggcggagcactagcgccatttgcgattctgttctcattgccgttcacagtcatcggtgccctggtcggactttacgtatcaggtgaaacgatcagtctgaacgccatgatcggtatgctcatgctgatcggtatcgttgtcacgaatgccattgtcttaattgaccgcgtgattcataaggaagcggaaggcctgtctacgagagaagcgctcctggaagccggctctacacgactccgtccgatcctgatgacagccattgcgacaatcggcgccttgattccattagccctcggcttcgaaggcggaagccaggtcatttcaaaaggactcggcgtaacggttatcggcggtttaatcagttcaacgcttctgacgctcctgatcgtgccaatcgtatatgaagtattggcgaagttccgcaagaaaaaaccgggaacggaagaagagtaaaaaacaaaaagcctcagctctgctgaggctttcagcttgttgaaaaaccctcgcattcgttgtcaggtctgcgcgtcggtgctcacgaattctacattcgctccgctccaatgctcccccttcctagactacaagggttttcaatcaagctgaaagaatgttaaggatgacaaaagctcaaaacaagaatcagttttgagcttttgtgcgttttcacctgtaagattatgtacattttgttgcgatttttttaactcatagtataattaaaggttgttagtgtaaaaatggatcggatactcttaagtaggatgatgagataatgaaacgtgcacgcataatatacaatccgacttcaggacgggagatctttaaaaagcatcttgcccaggtcctgcaaaaatttgaacaagccggctatgaaacctccacccatgcgacgacatgcgcaggagacgctacacacgctgccaaggaagcggcattgcgtgagtttgacctgatcattgcggcaggcggagacggaacgatcaacgaggtcgtcaacgggcttgcgcctttagacaatcgtccgacactcggtgtgattcctgtcggcacaacgaacgacttcgccagagcgctcggaatcccacgcgaggatattttaaaagcggcagatacggtcattaacggcgttgcccgcccgattgatatcggacaggtcaacggccagtattttatcaatatcgccggcggaggccgtctgacggagctgacgtacgacgtgccaagcaaactgaaaacaatgctcggccagcttgcttattatttaaaaggaatggaaatgctgccttcacttcgtccgacagaagtcgagattgaatatgacggcaagctgtttcaaggtgaaatcatgctgtttttggtcacgctgacaaactccgtcggcgggttcgaaaagctcgcgccggattccagcctgaatgacggcatgtttgatttgatgatactaaagaaagcaaaccttgctgaatttatcagggtcgccacgatggcgcttcgcggagaacacatcaacgaccagcacattatttatacaaaagcgaaccgcgtgaaagtcaatgtatcagaaaagatgcagctgaacctggacggcgagtacggcggcatgctgccgggcgaattcgtgaatctgtaccggcacattcacgtcgtcatgccgaaggagaaagcggaacagttggatgactaaaacttggcttggtaagccaagctcagaatgttgacaaaatcctaaaacagttttcgttttaggattttgtcatcttttcagcgtgattgaaaacctttgaagtctaggaagggcgagcatcggagcacagcgaatgttgaattcgtgagcaccgaagcacaggcctgacaacgaatgcgaaggtttgcctacacgctgaaacttggcttgaataggccaagtttttctttcgcttaaaactagaggtgattatagatgaaaatgaaacccccagtagaaaaaaatgaatactacgatgtgacatttgaggatttgacacatgaaggagcgggcgtcgcaaaggtccaaggcttcccgatctttgtgccgaatgccctacccgaggaaaaagcccaaatcaaagtgacacgcgtcaaaaaagggttcgccttcggccgcctgattgagctgaaggaagaaagcccgcatagaacggacgccccatgcccgatttacaaacaatgcggaggctgccagcttcagcacatgacctacgaaggccagctcctgtttaaacagaaacaagtcaaagacgtcttagaacgcatcggcaagctggacctttcaaaagtcaccgtgcacccgacactcggcatggaagacccgtggaactacagaaacaaagcacaggtgccggtaggagaacgggaaggcggactcgtcgcgggattctatcagcaaagaagccatgacatcatcgacatgagcgcctgcctgatccagcaatccaaaaacgacgaagccgttcaagctgtcaaagacatttgcgcaaactacggtgtcaaagcctacaacgaagaacgccacaaaggctggctccgccacatcatggtcagatacggcgttgttacgggcgaaatgatgatcgtcttcatcacaagaacaagcgacttcccgcacaaagcgaagatcatcgaagacatcacagcgcaattcccgcacgtcaaatccatcgtgcaaaacatcaacccaaacaaaacaaacgtcatttttggcaacgaaacaaacgtcatctggggcgaagaatacatctacgacctcatcggagacgtcaaattcgccatctccgccagatcgttttatcaggtcaacccagagcaaacaaaagtgctctacgacaaagcgcttgagtacgctgagcttcaaggggaagaaaccgtcatcgacgcttactgcggcatcggaacgatttctctcttcctggcaaagcaggcgaaaaaagtgtacggtgtagagattgtgccggaagcaattgaggacgcgaagcgaaacgccgaattaaacggcaacacaaacgcagagtttgctgttggagaagcggaaaccgtgattccaaagtggtacgaagaaggcattacagctgatacgctggtcgtcgacccgccaagaaaaggctgcgacgaagccctcctgcggacaattgtggagatgaagccgaagcgggtagtgtatgtgtcctgtaatcctggcacgcttgcgagagatttgcgggtgcttgaggatggcgggtacgtgacgcgcgaagtgcagcctgtggatatgtttccgcatacgaatcatgtggagtgctgtgtgttgataaaattaaaagaataaatagtcaaaaatctatgctgatggaactgttggttctctaaaacgataattgatttcaatggttccatttgcatgtacttctatttcatctactaacaaatgaagcatttcgggggtaagtgtaccttccttcatgaatttatctaagctctttttaaaatcaattatttctttttcaatcttttgaaattctaggtccttagatagttggtgaagggtagtttcaaaatttgaaatatcttcattggtgatatttatggctaattggtaatcttctttagatataacaccattagcaagagagataactaaattggatttatctctctttttatcgtttaatttttcattaatttcgattatcttagattcgattttttctttgtactttaacgctttttcacttaattctttaaaataattttccttactgaatttcaaatatatcttatttaggttggttattactttatcagttaaatctatttcacttacgtaatgatcactacatgcttttaaaccatgtttattataacttccacaaacataaccttttcgattctttttaaaatgcattgacctcctgcaatctttgcaaaccgcagtatttgtaaagagatgtacttcagcttgaggtctccttctttttctagttattaaaatctcttgtacaataagaaagtcttctaaaggtatgattggttcgtggcttttttcaataattatttggttttctaggttaactgaccttcttcttttactggtaacactcggtctatattctctacattgttgtagtgtcccagtatagtgaggattttcgagaatttttcttattgaagatccgtgccatttgtcagtagcgttctttttgcgggcaagctgcgagggactagtgaccccttcgttatacaatccccttgctattgcatcaaagccttttccagcaatatattctgaaaagattctaatatttactattttctctgcgtttgctgaatttgagagagatatgattgtagaacgaactcaagaaggtaaaatgttggccaagcagaatccggatttccgagaaggaagacccaaaaagttcacaaagcagcaaatcaatcatgcattaacattactagaaaatcattcgtataaacaagttgaagatatgactgggatatcagtttctacacttgtaagagctaaaaagaagaaagctgctgaagctataaatggataaatattgtgaattaattattcaatatcttgagaaatttttataaaagtaatcaaaagtttaatgggggaaacgaaatggcgctcattgatttagaagataaaattgctgaaatagtgaatcgagaagatcattcagatttcttgtatgaattactcggtgtatatgatgttccacgagctacaattacgcgcttgaaaaaaggaaatcaaaaccttacaaaacgggttggtgaagtacacttaaagaataaggtgtggtttaaggaggctaagaaaggaaagctctttgacgcccttattgatatagaacaacaagttgaatatctttcagctaagccacgatatttattagttactgactatgatggagtattagcgaaagatacaaaaacattagaggctcttgatgttaaatttgaagaacttcctcagtatttcgatttcttccttgcttggaaaggtattgagaaagtagagtttgaaaaggaaaaccccgctgatattaaagcagccgaacgttttgcacggatatatgatgtacttcgtaaagaaaacaatattattgagactaatagagggttagatttatttcttattcgtttactgttttgttttttcgcagaagatactgacatcttcaaacgaaatagttttacgaatttaattaagactttgactgaagaagatggttcaaatctaaataaattatttgctgatttatttatcgtgttagataaaaatgaacgagacgatgttccatcttatttaaaagagtttccgtatgtaaatggccagttgtttactgaaccacatacagagttggaattttctgccaaatccagaaagttaattattgagtgcggtgaattattaaactgggctaaaatcaatcctgatatctttggttcaatgattcaagctgttgcttctgaagaaagccgtagttatttaggtatgcactacacaagtgtccccaatataatgaaggttattaaaccgcttttcctagataaacttaatcagtcttttttagatgcatacgatgattatacaaaacttgaaaatcttctaacacgaatcggcaaaattaaattctttgatcctgcatgtggttcagggaactttttgattattacctacaaagaattacggcgtatggaaatcaatattataaaacgacttcaagaactcttgggagagtatctttatgtaccttcagtaactttatctcaattttacggaatagagattgaagattttgcacatgacgttgcaaaattatcactttggattgctgaacatcaaatgaatgaagaattaaaaaatgaagttcataatgcagtacgcccaacgttaccacttcatacagcaggggatattcgttgtgcaaatgctattagggttgagtggactgaggtttgtcccgcacaaggatctgaagaagtatatgtttttggtaatccaccgtatcttggttcaaaaaaacaaaacaaagaacataaatctgatatgttatcaatttttggaaaagtcaagaatggtaaaatgcttgattatatttctgcttggttttactttggtgctaaatacgcttcaactacaaatgcaaaagttgcctttgtatcaacaaattcagttactcaaggggaacaggtttctatcttatggaatgagttattcaagtttggaattcaaatcaattttgcctataaatcttttaaatgggcgaataatgctaaaaataatgctgcggtaattgttgtgattgtaggttttggcccgttagataccaaagtaaacaagtatttatttgttgatgaaacgaaaaagctagtttctaacattagtccctatttaactgatggtgaaaatattcttgtttcttctaggacgaagccaatttcagacttacccaaactgcattttgggaacatgcctaatgatggcggaggattactctttaccattacggaatatacagacgcaatcaataagtatcctgaattagttccctattttaaaaagtttataggttcagtagagtttattaatggtggtttacggtattgtttatggcttaatgaagcaaaatatgaaaaaataaagtctaatcctctaatacaagaaagaatctcaatttcaaaaaatcacagggaaaaatcaacagataaaggaacgaataaacttgcattaactccgtggaagtttagagatactcatgaaacaactaattattccattgttgttccatctgtgtcttctgaaaatagattttatattccaatgggattagcaggtgcagatacaattttgtcaaatctaatttatgtaatttacgatgcagaaatttaccttctaggcattttgatgtcacggatgcatatgacttgggtaaaagctgtagccggaagattaaaaactgactataggtactctgcaggtttatgttataacactttccctattcctgaattatcaacaagaaggaagaatgaaattgaagaagcaattcttgaaattcttgatcttcgtgaagagcagggtggtacattagcagagctttataacccttcaacaatgccaattgaattaaaagtagcacatgaaaagttggatggaattgtagaaagagcgtatcgtcaaaaacaatttgaatctgatgaagaacgcttagaagtattgcttaaattgtatcaagaaatgacagaacggtaggtgtaaggtgtatggaaaatataattgaaattaattataaccaaactggtaaaagtaagaaaacaaatgaatacggtatgcgtgaaatgcaggcaagagcttttgaaaaacgtaactcacaatatctcttagttaaagcaccgccagcttctgggaaatctagagctttaatgtttatcggtttggataagctcataaatcaaggtttgaggaaagtgattgttgctgtacctgaacgctctataggttcttcatttaaaaatacggatttaaaaagttatggtttctttgaaaattggaaagttgatcctagaaataatttaactgttggcggagataactctaaggttaaatcttttgttcgttttatggaatcggacgatcaggtgttaatatgtacgcactctactttgcgatttgcgtttgaaaaaattgatgataaagcatttgataattgtttacttgcaatagatgaatttcaccatgtatcggcagatgtcaattctcgattaggtgaattgttaagaagtattattcataattcatcagcacatattgtagcgatgactgggtcgtatttccgtggagattctgtaccaattttattaccagaagatgaggaattatttgacaaggtaacttattcctattatgaacaacttgatggatatgaatatctaaagggatttggtataggatatcacttctatcaaggccagtacacatcagctattaatgaagtattggatacaaataagaaaacaatcgttcatattccaaatgtaaactcaggggaatcgacaaaggataagtacgatgaagttggtaagatacttgatatgattggtgaagttgaatatcaagatgatgatactggaattatttatgttaagcgacattctgacggtaaaacattgaaaattgcagatttagtagatgaccaagttggaagagaaaatgtcgttgcgtatttgcgtaatattgaagccctagacgatttagatataattattgctcttggtatggcgaaagagggctttgactggccgttttgtgaacatactttgacagttggttatcgtggctcacttacagaaatagtacaaataattgggcgctgtacacgtgatagttacaataaaacctatgctcaatttaccaacctaatcgcaatgcctgatgcaaaggatgaagtagtgacttatacagtgaatacaatgcttaaagctatttctgcctcacttttgatggagcaggtccttacacctgactttaaatttaaacgtagaagaaatgaaagtgaaaaatcttctactacaggagaattattcgttaagggattgaaagaaccatcaacagaaaatgtcaaaaagattattgaaaatgatattaatgatttaaaagcaaaaatcatgcaagattcacaagtccaaaaaacatttagtggagaagtagatcccaaagtattgaacaaagtgttgattccgaaagttattcaaaaagtatatccaaatttatcagatgaggaaattgaggaagttagacagcacgttgttctagatacagttatgaaaggtgctaagtctgaagttgtaggaagtaaagaatttataagaatggcagataagtttataaacattgaggatttagatatcaatctgattgattccatcaatccgttccaaaaagcatttgaggttctatcgaaagaattgaactcaccagtgctaaaactgattcaggaaactattgatgcaaaacgtattaattttgatgaagatgaactagtattcatatggccaaaggtttaggaattttatcgttcaactggtagaagacctgattcaaaatctgaagacccacttgaaaggcgtatgggtgaagctgtattatacatgcaagagcttaggaggaaacgtgaaaatggcaagtaatagataccattctattaatgaaatcatggaaagtcagctgttttaccaaatcacaacaccacctaagaaaacacaaaaagcccagtatgatcctgaagttgaaaagtttttggagattattgaattcgtcaaagaaaatgggcgagaaccccaaaaagtccctactgatttaactgaaagaagtttagcaagtcgattaattgggattcggaaagatcctgatcgtatggaatatttgaaagagtatgatgaaattggattacttgaagtaagatcgaaggaactaacaattcctaaaatttcttcaattgatgatattctaaaaagtggcttatctgcattattaggtgataatttaaataatgatataactaggtcaatttttgatacaagttcacttcaaaaggttacgacaatgcctgaatacgttgcaaagcgtaaaaaaataaaagattttggaaagtttgaagagctattcaagaagtgccacaaggaaattacagagggtaaacgaaaaattttaactttcaaaaatgaacaagacatacagtcaaatagtttttatatattaaaaggagttcttctttatgttgaagatgtgggagaacgtaaaaaagcaaagggaaaaaccaatgctagacttcgatgtatatttgaaaatggaacggaatcagatatgttactacgttccttatcagcggagttatataaacatggtagacgtgtgaccgacaatgaagatacattgttggataatgttagagaagatgatgtttcgactggctttatttacgtactaaaatctttgagtacagatccgcaaattagttccattaagaatttatataagatcggttttacaactggttcagtagaaaatagaatcaggaatgcagaaaatcaatcaacttatctttatgctccagtagaaattgtaaccacatatcaagtgttcaatatgaatgctagcaaatttgagacggcaatccatcatgcgctagcaaataataatttggatgtttctattttgggggcaaatggaaagatgttagttcctaaagagtggttcgttgtcacacttgaagatttacaagctgtaatagatgagattgtgatgatggttcatctttatgactaaattagtatattaggattttagtattaataataattttatagtagactatgaaaaaatttgatgccataacaataacttgttccgctttggagtttgtcacaattgtagaattatgtgttgcgagtattaataggaaggggttgagcgaccgcaaaaaaaattttcggtgctgtccgcaaaagggagtttgggtgttttgcgttatatttggttgtgtgaaggttagcggaaactcaattcgtgaagttaggattgcggttattacgactgagtagtttcgtcatactcttttagcagtttttctgtcttatgcatttctttgagcatcggattcatgtagtcgttagctgattctagatatgctctcgtcagagtgtctagtttatttctaactttagagaggtcttcttcgaattttccatccgatgattgaaggataaattcttttgcctcttcatatctttttaatatgtttttcaccattggagttggattcttttgatttattgtttttattacagtgattgttaaatttatttgttttattaattcttttcttactgtcaaggtgatgctccttttaaatctctattctatttgagagttgctatatctgtttaatggtttgatagactactcatctttataatttagagcaatttttacaacttgttccgctgtgtaatcttcattgctccagaaaattaaatcacttggtgccggataaggaacatttttctctaataaatcgagatattcactgactttctcatcatctaatgttgggttcattaattcctttacaagaaagatcaactcttcttttgtcagtttatccattgtttgccctccaatagattgtatctccattgattttacaaatgactttatttcttctgataatgttataggttgtttgcataatgatagataattgtcttgagaaaagttagtctcattatagagtttattaattgtatttataacaatatattcatatggaaaacctctaaaatatctttattttagattggtttataaaaaatagctcagcagagtagggctgagccattttttaattatagaccgaggtaactaattacaaattctttatcatcctcatcttcaggcaaaataccaaggtttttatattcccatattgcgattctttcatatccatctaattctgaggctaaaatatcatcataattataatctaattggaattctccgctacgatccaatgttagtgtaaggttagtccaaacatcatcgttattatttctgtgttcagttcttaattcttcaaaaagttctcttagttctcttaacaacgtcttgaaaatatccttgcttacgttgtaatggctaggtatatcttgtgaataaataatttgattattttctggtgttctgaaatgaaaaagaaccattgtggaatcatctaatacttctgcataaagatatatctttgtccattcaccaggtatgatgtcattgagtttttctccaataagttgatacaaatcttgcatcttcctagtttccattcttctaacccccaggctgatttttaatagagacgcttatttcttttctgctcccaattttgtaggttacatcgaaatatgatggtctaagtgaatccccagaatagactggttctatttgaactgctacttttttaggtggttttttgcttagggcttttgcccactcctgctccatctcataccatttcccaccgctcctattaatctgagaattcatcggcacgatattgtcaaactggcctgagcctttgaattgggtggcgattaaatggccgccgtcatcgtcaggctttcggtcctggggctttccagcattcgtttgtgcatattggtttcgtttcgcttctcccagctgcaagtctgctttgacacttgtaattctaccatagttgtcagtcgtgtacgtgtagccttcttttgttttgtagatgatattaggcttcagcactttctttctgctccatcttgcgaaatgctcgccgtatttgacggttaccggcggtacatgtggcgctggagttcgtcttccgcttgatgacgttccgtatggtttcggcaggatgaccttggcgaatttttgcagtccttctttaagcgtgaccccgttgactgcgttgtaaggaacgcctgccggcactaaatcatgacggggatgatacgggagaatatccgcaagtgtgagatctccgatttgatttaacttggttttgacgtgtttttttgatacttcaatgcctgtgtttactttttgtttgatgtgatcaacggtttgttttgagactgttatggctttttgggctgttgctgatttgcttgctgctgttttgactttggtcgtcactttggcggctgtgccagtttttgagacggctcctacgccttttgtgccgacaattgatgtgacaacagtgccaaccgcatatgacacccatcttgctcttgagtaggtgtcaccattcaccatgtctttttgatacgattcttcgattgccgctgaaatggcttcatacgttttgatcgggtgagccatcgctccggtaatcgcttcaacggttcctcccggatctgtgaccatatcccacaggcctacgaccgcgtctttcccggaatcataaaggccgacggcaacccctttgaagcctgcttcaagctcacgcgtgttttcaatttgggtgaagtatctctgttgttcagctgtcagattttcatagccgatcgtttttgccatttcgtagaattcatcggcatctgcataatcgtagtttttcagtctttctttcagtttctcaatctcgcgttccttcgcttcctctttcttaatcttcaagtaagcctcagtccgcttttcaatgtcgccttttttcttatgtatgtcactctcacggtacgccttggcgttgtagtggatgggtgtggcgtttttgcctttacccgttgcttcttggagcttttggaagtcggatttgatgaattgttcgtttggttcagacagggcgtattctgttttcaggtcttcgtccaaggcgtccaatttttccagtgtttttttgcgtttgtcgttggcatcggccagctcgtctttgaaggtttctgttgaaaacaggtcgagcgggaggatgtcgtcgatatcgtttaggatgtctttcatcgcttttttctgttcggacatgatggatttagattttttattggcatttgccagttcgtgctccaggaaggattcttcgatgtatgcgtctgagaggcctttgtcttcggcggctccggcgatgctgttgaaaaatgcgattttcatgtcgatgtagtcgatccactggtcggcgacgccgacgtggtcgtgatagaatgccttgatgttgctggcgccttttcctgagaattcactgtcactgagatcagcgactccttttaacgcttttctcaagttgaccatttgcgttcttagttctttgtactcttttgcacggtctgtcgcttccgaaagcagtgttttcgcttcaaatactttcatgaccatttcccttcttttgttcgctcaatatcaaaattttaccacgggtcgggataaggtgggggtgagaacgtgttttggtggaaaaatgagtcatttggcatgtgtctttattcgtggagggattggaggaaacatggtcgaaatgatattgattgctacacattttttggaagtttgtattctatattgttttttaaggagcatgttgatgacgaaaaaacggattacatttggtttattagttttaatggtatgtgtcatcctgtttgttctgtatgttcagttacgcaataaagatagtattcctgtccaatcttccgccattcaccccgaagaagaccgcatcttttttatttactccaatcctttcataaaagaaagcgtgctgctttcaacctctacaggcgaacggtttaacaggcgtacgtttaaggtggcggatgtgccttatattcaaacgaaatcttatgcatcaacagaccttgtattattggcggaacacgagcctttttactacacgctggagaaggatgtgatcaaagagcatccgctgtcagatccatttgcgttttggtatgaggggaaggatgtcactattgaggcctataatgttgatacgacgggaaatgagatccacataaacgacagaaaaacgaaaaaggaatatacccttaccttgcctccgcttgtcacaatgggggccagtgatgagaactttatttatatcattcaaagcatgtctatttacgtgattgacagaaaaacagaggaaatgattgagaccctgagcttagcctcatacgctgatcaattcgcagactcggaggaatttatcgtcgcgagctcggatcataaattgactgtgattgaaaaagggacatggaagacgacatatattgcgtatcctgaagatcttgaatatgcagatactgtgtactatgacaaagaaagcggcagtttttacgtggcgtacgaggacaaagagggtggagcgaacttgctggaatatggggaggatttttctattcacacatacagcttgaaattcccttatatggaggcgaagtttaaggggaatctattgtatatagttgcccaggaagagcataaaaagggcatcggcggatacgtgggtgtgtttgatatccattctaaggagatgctttatcagtttgatttgcctgaggaacaggtgaaggttcaggattttgttgtggttgacaataagtgaatactatatgaaatagaatgacaaagacccttgcataaagggttcttttttatgaaaaaaacaaattgacaggatgaaaaaacaatttcttccttctatattgttttcaaaatttgggattgatagaatatgacatatctcatagagaaggagggaagccgttgagtcaagccataccgtcttcgcgtgttggtgttaagattaatgaatggtataaaatgattcgccagttcagtgttccggatgctgagattctgaaagcggaggttgagcaggacattcagcagatggaagaagatcaggatttactgatctattattctctgatgtgttttcggcaccagctgatgcttgattatttggagccgggaaaaacatacgggaatcgccctacagtgacagagcttcttgaaacgatcgagacccctcagaaaaaactcacaggtcttttgaaatactactctttgtttttccgcggcatgtatgaatttgaccaaaaagaatatgtggaagcgatcggatattatcgcgaggcggagaaagaactgccgtttgtgtcagatgatattgagaaagcggaattccattttaaagtggcagaagcgtattatcacatgaagcaaacccatgtgtcgatgtatcatattcttcaagccttggacatttatcaaaaccatcctctatacagcattagaacgatacaaagcttgtttgtgatcgccggcaactatgatgatttcaaacattatgataaagcgctcccgcatttagaggcggcgctggaattggcaatggacattcaaaatgacaggtttatcgccatttctctattgaacattgcaaacagctatgacagatcaggagacgatcagatggctgtagaacatttccaaaaagcggcgaaagtaagcagagagaaagtgcctgatctgcttccgaaagtcttgtttggattaagctggacattatgtaaagcgggccaaacacagaaggcgtttcagttcatagaggaaggattagaccatatcacagcacgttctcacaaattttataaagaattgtttctgttcttgcaggccgtgtacaaggagactgttgatgaacgaaaaattcatgatcttttaagctatttcgaaaaaaagaacctgcacgcttacattgaagcatgtgcccggagtgctgccgctgtttttgaaagcagctgtcactttgaacaagcagctgcgttttatcggaaagtgctgaaagcccaagaagatattctaaaaggagagtgtttatatgcctattaagaaaaaagtgatgatgtgtctggctgttactctagttttcggaagcatgtcgtttccaaccctgacaaactccggtggatttaaggaatcgacagatcgaaatacgacgtatatcgatcattccccttacaaacttagtgatcagaagaaagcccttagctagggctttttcttgctttacggaagacgttccattttccacatcgcggcattccttctatttctaacgcaagacactcgaaacaaccaaaccatttgaggtataatggataaagtgaataacagtatttagattgatatatatgaaagagagtggaacatcatgggccgtaagtggaacaatattaaagagaagaaggcgtctaaggacgcaaatacgagtcggatttatgcgaagtttggccgtgagatttatgtggcggcgaaacagggcgagcctgatccggaatccaaccaggcgctgaaggttgtgcttgaacgtgcgaagacttacagcgtgccgaaaaacatcattgaacgtgcgatcgagaaggcgaagggcggagcggaagagaattacgatgagcttcgttatgagggcttcgggccgaacggatcaatgattatcgttgatgcgctgacgaataatgtaaaccgtacggcgccggaagtgcgtgcggcgttcgggaaaaacggcggaaacatgggtgtgagcggatctgttgcttacatgtttgacgcgacggctgtaatcggtgtggaaggcaaaacggctgacgaagcgcttgaaatcctgatggaagcggatgttgatgtacgtgacattttagaagaggatgacagcgcgatcgtgtatgccgagcctgatcaattccatgcggtgcaagaggcgtttaaaaacgcgggtgtcgaggaatttacagtagcggagctgacaatgcttgcgcaaagtgaagtaacgcttccggatgatgcaaaggaacagtttgaaaaattgattgatgcattagaagatttggaagatgttcagcaggtatatcataacgttgatttaggtgagtaaggagtgagcaggctgttatggcctgctttttttgtcccggaaattgttttagctgtatgtaggcggccgcctatacgatctataagatattctcatactctggactgtaacctatgtgaaggagagagtaaatatgactgatacaagacatatgtatggcggacctggttttggtcattatcagggctttggtattggccacccgggctatggcatgcaaagcacaggctatccgggctatggcatgtatggaggccacccgggctatggcatgcaaggctacccagatcacggcatacatggaggagtcggcggctatccgggatatggtgggtacggcggttacccaagcggcggctatggaggctctccgggaactggaagctatccgagcatgcaccatgaaaatgatggccatcaccactattatcaccatcatcatgatggaaaagataatcttcatcaccatcatcaccatgttggaaaggataatcatcaccaccatcatgatggtcattatggccaccatcatcaccatatgggccactggggaaaagacggttataaataaagaagatgatgataaaaagaggacactcttgcagatcaagagtgtttttttagcttttttcttgactgttcagtctggaaaatggtaacatttgtttcaggaggtgatcattttttggggaggaataaagaatttgatacggcgcttgttcttcacagggcgatagaggtttttggagagtatggctacgaaggaacgtctcttcaggatctgctctctcatttaggcattgcgcgccaaagtttgtatgatacgtatggaacgaagcgtgatttgtttttgtccgctgtgaaatcgtatcttgaagggaaaaacgctgccgttatggaaaggcttgaagcgccaggatctgtaaaggaagccattcgtgatatttttcaggagggtgtcaatgccctgagggatccggaacgggcgaaggcgtgctacattattaacagcgcgattgaacagatcccgcatgaccctgagcttgcccggtattttgaaagacaatccaagcagcttgaggacgctttttatcacgggcttttaagagcgaaggatcaaggagaattgaatggcgaagatactgatatatctgcgcttgctcggtacctgaatcagagcaggctgtcactgacatttattgcaaaagtgacggcagatatggatcggcttcaggaccatgttgacgtgagtttatcagtgcttgattaacatgtggtaaaggattctttgcccatgtatgtactttttggactgaatagtctagaaataaaaatgaggtgatgatgaatgttgatgaatgagtttgaaaaagcatgtgaaacattgagaaagtttatggcttatatgcttgagaaggacatgaagagctggacggagctttgggatgagaatgctgtatttgagtttccttatgcgccggagggatcaccaaaaagaatagaaggaaaagcggccatttacgattatattaaagattatcctaagcagattcatctttcttcatttaccgctccgacagtgtaccgttcagcagactcgaatacggtgattgcggagtttcaatgtgacggccatgtgattgagactggactgccttatcgccaaagctatatcagtgtcatcgaaacgagagacggccgcattgtgcgttatagggattattggaatccgcttgttgtaaaagaggcctttggaggatcatttttgcaaacagaggagagtgggaaatgatgaaacagaatccgattttaatcacgggcgggaccggcacagtcggcagccgaatcgccagccgtttaataaagctgggatacagagtgcgtattgcaagccggaaaaagggcgcgcttgctgatgctgagtatgtgtattttaattggaagtacgcctccagttttacgcctgctctggaacaggtaaaacagatctatcttgttgctccggtcggtgtatttgatccggctccctatgtgcttccctttttaaaggaagcaaagcgtctcggcgcaaagcgggtagtgatgcaaagtgcgtctgttgtctccgagaacggtcccgtgtttggcgcgcttcaccaggcagtgcgcgagtttccagaatggacggtgctgcggccctcatactttatgcaaaatttcatcaatgtccagcaccgcatgtctattcaaacggaggggcgcatcacaacggcttcgggtgaaggaaaacttgggtttattgacgctgatgacatcgcagaaacagccgtcagggctttgattgatgatgttcctcatcaaacacatcatattctgacaggtcccgaggcgctgagctatgccgaagcggcggagatcattggagctgcggcgggacgccgggtggagcatgtcagcatttctcgttccgagctgcagcataaaatggaggcaggaggtttgcccgcggattatgcccattttatggcgaagcttgatgaggcaattagccatggtgcggaacatcgggtaacggatacagtgaagcgtgtgacgggaaaagaacctcgttcgctgtcagagtttgcggctgctcatgctgcatattggacctcattttggactgaatagtctagaaagaccttcggcgcttccgaaggtcttcttattgaaaaagctaagtcgtgttttagtcataatcatgcctcctgcctcatacctattaaggtcattgtttttgagaaaggaggagccggaatgaaggatatgcagccgtttacgcctgtcaaatcatatacgccctttcacagccgttttgatccctgtccgcccatagggaagaaatattacagaacgccccctaacctttatatgacctttcagcctgagcacatggagcagttttcgccgatggaggctttgaggaaaggcaccctttggaaggatctctatgatttttatgaaaacccttatcgagggggagacgcacatggcaaaaaaggttgacgccgaatattatcgtcagctagagcaaatacaggctgctgattttgtgcttgttgagctgagtctttatttaaatacacatcctcatgatgaagatgcgttgaagcaattcaatcaatattccggctattcaaggcacttaaaaagacagttcgaatcctcttacggaccgcttctgcagttcggcaacagccccgcgggcaaggattgggattggggaaaagggccatggccgtggcaagtataaggaggaatgcctgaatgtgggtgtatgaaaagaagctgcaataccctgtcaaggtcagtacgtgcaacccgacgctggcgaagtatttgattgagcagtatggcggagcggacggcgagctggccgcggctctccggtatttgaaccagcgttatacgattcctgataaggtcatcggccttttaacagatatcggcacggaggagtttgcccatttggaaatgattgcgaccatggtctataagttaacgaaagacgccacaccggagcagctgcgtgaagctgggcttggcgatcattacgtcaatcacgacagcgcgcttttttatcataatgcggcgggcgtgccgtttaccgcgagctatatccaagcgaagggcgatccgattgccgatttatacgaagatattgccgcagaagaaaaggcgcgggcgacgtatcaatggctgattgatatttcggatgatcctgatttaaacgattccctgcgttttttgcgtgagcgtgaaatcgtacactctatgcgcttcagagaagcggttgaaattttaaaagaagaacgggataaaaagaagattttctaataggcagattggcctctctttcatacacccttttacatacagagaaaatggtctgtttttgcagtttggtctgcattataatcaaggtgtgtgtgcaagcttactttttgattgggaggcctttatgacagcttttaagattgagaacgaaacgattgcagatggattttacgcgtgtccggccgtctatgaggatgcagaatcgattaccgggttgctcgtccgaacagctgaatggctccgggatcggggttctaaccaatggagcggacttctcaaagggcaagatatacatgatatcacggggtcaattgaaaagggacatgtgtttgtgtttaaaaaagatgaagagcttgcggctgtcgtgatgctgctgcctgcaccgagcgagtgggaccggacgctttggggagacgatgggcatgaggagtccatttatttacaccgcctcgcagtaagccgccggtttgcgggacaggggcttggagcccgcgtccttcagtgggcggagacgggcatacactttccggaaaaaacgcggatccggcttgactgtgtcgctgatagtgacgccctgcattccttttatcggcgtatgggatatgaattcatgggtgctgatgcgtccggatatcatttgtttgagaaagagattacggcagaataagcgtcctttgcagggggcttttttgtctttttctaaaagggaggcaggcgatgtgtggtcaatattatttgtgacagggattgtgacggcttgtctgtttgctggcgtatccgtattgatgcggatgagatttcctgacaaaagtcggccggaatggatgttggccgggctgatcgtccttggtgtgtttgcgatctggtacagcctcgtgtatgtacgcggctgggaaggggctgcgctcggaatgcttggattcaatgtcattttcggagccattgccggatatttgatcgataaggccatccggcgttacaggaaaagataaggctgctgccgtctctcaacaggtcgaaattttcacagaccggcaggaattttctttcgaaaggagaaatacatattactttaaaatgaaagcgttttccaaagcaggaaggtgatgttgatgatacacagtgtggcaaatgggctgaatcatttttgtacgtgggtgatgagactggcctatttgaatgtgctttggattttgttttctcttgcaggcctggttgtatttgggctgatgcccgctactgccgcgatgtttacagtggcgagagaatgggcgaaggggaatacagatgccccggtgttttctgtcttttttcggacgtttaaaaaggaatggcgggcatcacagatcctcgggcttatcgttgtgacggctgccctgtttctgtttgcggatatgcggatagcggctcagatggaccagcctgtgctcgtcaatgtattcgtgagcattagtttgattttcgcgtttgttgtgctgtatgtgttcccggtattttctcattttgacgtaaaaatcagagaggtgctgagcatcagctttttcattgccttcagtcgtccggcggtgacgcttttgatggcagcgggcgctgtcggtgtgctttgtctcgttctgtttcatgtcacgtttctattgtttttcagcgggagtttactcagcctgatcttaacgaagctgtcctttaaagcgtttcggtcaatggatcagcggcaggagaaagaaaaggcggcatgaagaaaagagttgctggctggtacaggcggatgaagattaaggataagctgtttgtgtttctatcgttgattatggccgtatcctttctgtttgtatacagcggggtccagtatgcctttcatgtgtatgatgagcagatttaccgcaagtcctcggaggtgcttcggatgtcttctgaaaggatcgaagacgagctgaagaagatagaggatgtgtcatatgaaatcattacagacgaacagattcagcgcatcctgagcatgcaaaatcgggatgatacgtatgatcaatatcaaatgaagcaggagctgtgggatcagcttgcgggatatgccagcgatgaaaagtacatcgattccattcatgtgattgatgcccgcggctcagagtattcagccggaagcagttcttcagatcttttgcagcaggagcaggaagaggtatttaagcgagcgaaagcgaaaagtggaagaaatctttggatgacgctcggcgggtcagaccccgtcctgatttcagcacggcagatcaggtcctatcaccagctgagtctgaacggcttgggcatggtactgatccaggtcaatgtaaaacagatgattcgtgatgtgccgaaggattggggcgattcagtcggagacattatgattgctgaccaaggcggtaatttggtgtatacggcacatgcatcagcgcatgttcctgaggcagcaaaagagacgttgaagcaccccggttatgacttgataaaaaagaatggcaaacgttactttatttcttatcttcaatcatcctaccaaaattggagctactataacgttatcccctttgatcagatgttcgcaaaaatttcctttatgaaaacagtgatcggcacatgctttcttctctttttctgtgtggttttgcttttcggaaggaaaatcgccaacagcatcacggagccgattgaacagcttgtgaccgcgatgaaatcggtacagcacagcggcattgaagcaggtgtgtcgctttctctgccggaacatacacaggatgaggccggcatgctgaaccgccattttactgtcatgatgaaacggattaatgagctgatggaagaaaatgtggaaaaacagctcatcattaaagaaaccgaattgaaagcactgcaagcccagatcaatccgcattttttatataacacgctcgagtccatcaattggctggccaaggcgaatcagcaaaagcaaatctcaaaaatggtggaatcgctcggttttcttctgcgaaacagcatacatatgaagaaggatatcgtgaccattcaggaggaggcggacattgtacgtcactatatgaccattcagcgatttcgatttgaagagcgcctgaaattcacgttggatattgacgatgaggtgaagcattgcctcattccgaaactgacgctccagccgcttgcggaaaatgcgattcaatacgcgcttgaaccctttacaaggccatgcgccatccggattcaggcgaaaaaggcgaagggctgtgtctgtattacggtcgaagataacggccctggcatggatggacggattcttgaatcaacgggtggaagaggaatcggactttggaatattcgcgagcgcatcagcctgacattcggagagccatacggattgcggattcatagtgagcatgaaaaggggacgaggattgtgatcacaataccgtgccgaaatgaggtggtgtgatgtataaaatactgctggctgatgatgagaggattatccttgatggaatggcgggaatcattgagtgggagtcgcttggcgcctcattgatcggaaaagcgcagaacggacatgaagcatatgaaaagattgtacataagcagccgcatatcgtcatcacagacgtcaaaatgcccggcatggacgggcttgagctgatcaaaaaggtgtcagccgtcagcccgtcggtgcaatttatcgtcctgtccgggtttggagagtttgagtacgcaaaggaagccatgaaatatggggtgaagcattatttgctgaaaccctgcaatgaacagcagattatcagctcgctggaggaaatcattgctgagctgaagcggcaagatgtgcacaaaaagaaaacagcccatctgaaacacgagctggaccatatccgttcctttgcagccgatcaatacttggaaggcttgatcgccggtgtggcccagctttctccgccgccttcacttgccggaaaaaagatccgcctcttgatcttaaaaggggaacaatctattgatgctgcagccagagaggcactcggatcggcactgacagcggtttgcagcagcggtgaatggaccgtgctcgccgtagaggagaacgccgctgaaaaggtggcggaggtttttgcggaccgcaagatggccatcagtcaggcgggagaactccggcacgcggggcagctgtttcgtgacacagctgaagcgtctggtgacctgcatgggagcgcagtgatttcaaaaatgatcaggcttattgccgacgagctcggaaatccgaatctgtccttaaaatgggcggcgaaggatatgctgtttatgaatcctgattatctcgggaagttatttaagcaggaaacaggcgagaaattttcccaatatgttacacgggtgcgtcttgagcatgcgatgaagcagatgaaaataaggagggacgtgagcgtttcagaaattgctgaagaaatcgggtttggcgataatccgaagtatttcagtcttgtttttaaaaaatataccggtctgacaccgtcagaattcagaagaaaacagggaggcgcttccgcaggatagccatctctgtttttttgactttcgccactgttttttgagtgtttcgccctatccgaacgctttaaaataaaatgtaagcacttacattaaaggggggattggtttgaagaagatttgttacgtgctgttatcccttgtctgcgtctttttgttcagcggatgttcagcgggtgaagaggcctcgggaaaaaaagaagatgttacactcagaatcgcgtggtggggcgggcagccaaggcatgattatacaactaaggtaattgaactatacgagaaaaagaatccgcacgtccatattgaagcggaatttgcgaactgggatgactactggaaaaagcttgcgcccatgtctgccgccggccagcttcctgatgtcattcaaatggataccgcttacttagcccaatacggaaagaagaaccagctggaagatttaacgccgtatacaaaggatggaacgattgacgtcagttcaatcgacgagaatatgctgtcgggcggaaaaatcgacaataagctttatggatttacgctaggtgtcaacgtgctgtctgtgattgccaatgaagatttgctgaaaaaagccggtgtgtctatcaatcaggaaaactggacgtgggaggattacgagaagctggcgtatgatcttcaggaaaaagccggtgtctacggttccaacggaatgcatccgcctgatattttcttcccttattatttgcgcacaaagggtgagcgcttttataaagaagacggcactggcctcgcgtatcaagatgatcagctgtttgtcgattactttgaacggcagctgaggctagtgaaagcgaaaacgtccccaacacctgatgaaagcgcacagattaaagggatggaagacgattttatcgtcaaaggcaaatcagcgattacatggaactactccaatcaatatttgggctttgcccggctgacagactcgccgctgtctctctatctgccgccggagcaaatgcaggaaaaggcgctgacactgaagcccagtatgctgttttccattccgaaaagctctgagcataaaaaagaggcagcgaaatttattaatttcttcgtgaataatgaggaagcgaaccagctgattaaaggcgagcgaggcgttccagtctccgacaaggtggcggatgcgattaaaccgaagctgaatgaggaagaaaccaacatcgtggagtatgtagaaaccgcgtcaaaaaacatcagcaaagccgatccgccagagcctgtgggaagcgcggaggtcatcaagctgctgaaagatacgtcagatcagattctgtatcagaaggtatcgccggaaaaagccgccaaaacgttccggaaaaaggccaatgagatattagagaggaataattgacgggaaatggggctgacgcaatgaaaaaaagccggagtataagaaaagacaatctggcgggatatgcttttatttctccgtttatcatcgggttcctatgctttacggtgattccgatgggggcgtccctgtttctgtccttcacgagctatgacttgtttacggcgccgaaatggatcgggctcgacaactttaaggaaatgtttacgggtgacgaaaagtattggcagtctctgaaggtgacgtttacgtatgtgcttgccggggttccgctccgcctcggcttcgcgctttttatcgctgtcattttaaacaatgcagcaaaaggaacggccatttacagaacgctcttttatctgccttcgatcatcggcgggagcgtcgccgtggcgattatgtggcgcaatatttttggcaatgacggggtcatcaatgcgctgctgttttttgtcgggattgatcaaaaaattctttggtaccagaatccgacaagtgcgctgtggacattgattctgctgtccgtctggcagttcgggtcgtcaatgctgatttttttggccgggctgaaaaacattccgtcttcgtatttggaagcggcaagtgtggatggggcaaatcgggtgcagcgtttcttcaagatcacgcttccgatccttacaccgattattttctttaacctagtgatgcagacgatttctgcttttatgacatttacacctgcctatatcatttcgaagggcgagggcgggccgcttgacgggacacttctctattcgctctatttgttccagcgtgcgtttaactattttcaaatgggctacgcatcggcgatggcgtgggtcatgcttgtcattgtcgggctgattacgctcatattgtttaaaacatcgtcatattgggttcattacgagtcaaaggaggaatgacggatggagccggtcaaccagcctgtcagagaagccccggtttttgagagaaaaaaagccgggcgcgtcagtcccaaacgcatactgttccatgtttttacggcaacgctggcggtgttgctgctgtacccggttatttggctgtttgtcagctcgtttaaagaaagcgccagtatttttacaacctcacattctctcattccagacccttttattctcagtaactatgctgaagggtggaagggcattgcgggacagccgtttctgacgtttattaaaaactcggcgattattgtcgggctgtcaacaatcggtgccgtcatgtcatcggctgtcattgcgtacggatttgcgcgtataccgtttaagggaaaaaaattttggtttgcgtgcatgatggggacgttaatgctgcctcatgaagtgttgatgattccgcagtatattatgtttgcgaaattagactggctgaattcctttaaaccaattgtcgttccgcaatttttcgggcatgcgttttttatctttctgatgatccagtttatccggacgattcccgaggagctggatgaagccgcgcgaatcgacggatgcggacgctttgcctgcttttggcggatcattctcccgctgattgcccccgcgcttgcgacgtctgcgattttctccttctattggaagtgggaggagctgattcagccgctcttgtatttgaataagccggagctttaccctgtttcacttgcgctgaagctttttctcgatacagagtcggcttcgaactggggcgcgatgtttgccatgtcagccgtctcgttattgcctgtgattcttgttttctttttgtttcagaaatatatcgttcagggcatcagtacgaccggattaaaataaaaaggagtgttgcagatggcacagcttatctttgatgaagaaaaggtgacgtcggttattgaccggatcgtgaaacggacatttcagatggattttgcgtgggattggccgggcggcgttgcgttttacggtgtggcggaggcctatgaagcgacggaaaacgaggaatatatcaatctgttaaaaacgtgggtggatgaacagctggaggatgggctgccgccgctttcgatcaacggagtttccattgggcatacgcttttgttcctccacaaggtgacaggtgatgacgtgtatttggaaacagcggccgagatggcggaatatgtgctgcataaggcgccgcgctttggcgagggtatccttcagcatacggtgaatgcggcagaatacgtattccctgaacaggcatgggcggatacgctgatgatggctgggctgtttatgctgagaatcgggcgggtcatggagcgtgaggattattttgaagacggcctgcgccagtttcacggacatgaggatgtgcttcaggaccctgtcacgaatttgtactaccacgcctgggacaacaaagcgcaaaatcatctgtcggggatttattggggcagggcgaacggctgggcggcactcacgatggcaaaggcgctcccgcttattgaggtgacacatccttcctttatgatcatcgacggatcgctcagagaccagctgagcgcgcttgtccggcttcaggatgaatcagggctgtggcatacaattttggatgatccggattcttatctggaggtttcggcatcagcgggtattgcttctgctctgatgtcgagcggaaagctgtatacaaaatatgtgcagaaatcgcttgccgccattttggatgcagtggaagaggacggacgggtcagcagggtatcggccgggacagccgtcatgaaaaatgccgaaggatacaaacaggtgccttacaaacgaatacaaggatgggggcagggacttgcgctgacgtttcttgctgatgttttgaaaacgaaaaaacgcttgtatcagtaaagatagcggcggggggagagggatgaaaaaacagcctcaacagaaggaacgggtttctcgctggaagggaacgtatttcaaaagaaactttgtcttcattttgctgattgcctgtattcccggattgctgactggcggcgcaatctactttctttcgatcgacaaggtggagaaagagctgcagagatcgcatgaaacacaggtggcgcgtgaggtcagccgaatggatgagaagctgggagtgcttgaactggcactcacccagatggcctacgattcttcactgatgaacggattggccgagagggatttggagaaagactttacgttctcctatcaattaacgaaaaagctgtttcttttgcgggatcagcagccgctgatcgagcaggcttccatctttctgaacagcccccggccacttgtgctgagccctgaatacagcgctttgacagaacaggaggcgcttcgcaagtatcgctcgctgcttgcctcagaccacagcatttattggaaacggtcgggaaaccaagcgatgctgatccagctcattccgggcgcggcggagaaaccgttcggcgcgatcatgctggcggttgatccgaaagaaatggaatcaatcctgcaaagcttgtccccctatcctgatggcagtgcgttgcttttagatcaaaatcgagaggtgctgtttcatgagggggaaaaagattttgaaaagactttacttcatgagataaaaaaacagcctgctgagaacggccattttcagatggaatgggaaggcaaggtgtattctgtctcctttggagaaatgaaccggatgcatcagcaatggacctttgtgtcagcggcgcctctttcagctattacagcgccgatggtgtttttatcaaaagtgatcatcgtgatgctggtcatttgcatcggtttggcggtgtgcatgacatggtatgcatcaaaaaaaatctatcgtcccatccagcatttgcttggcttgtttaccggaggagagaagaaaacatggcaggcgtccgggcaggatgaattcaaatggattgaaaagagatggcaggatctatcccttgaaagccggaagctccaacagcagctcctgcggcagacgccccatatgaaaaagagttttttgcagcatctcttacagagcgatttttactatgacaacgaggaaagcctcagatttcggatggaggaggctggctggaacatcggcggaaacgtgtttcatgtgcttgatctacaggtgacagggctccgctgtgaaaaaagcatcttccgtgaaggtgatgaacagcttgccgtgtttacactgactaatatcgctgaggaattggcggctaaacgcgtttttcagctctccatacttgatatcggccggctttctgtcaccgttcttgtgatgaaaacaaacagctctgatctgaaggcgtatataacggagctggcacgccaatttggagatgtaaccggactatgcctgacctcgacattgagcagcaagacggagcgtgtcacggaaattccttctttatttcaggatgtgaaatgcggcaaatcccgcaggaagtttgctaaccgggatcaggtcattgatttgcaggccgacttccctcgggatgagcagttcgctccttattacccttttgagctggaaaaacaaattgttcagaccatccggctggaaagaaaacaggaagccaaggaactgatagatggatgtatgaaggaactgtcggaaaaagcggccatagacaggcatgtgcattccgccctgattcagctgttttcccgcattcaggaggatattttgcattccgggctcaatcccagcgaactgtttcagcaccggaatccgtttcttgatatttcagaattgcgcgaacctaacgaagcggcggcctggctgatggatgtagtggtgacgccttacctttccaagcttgagggcagaaaaaacagacagcaaaagcagctggcagaacgtgtgattgcgatgattcacgaacagtatatggcggacatttcattggaaagctgtgccgatgcgcttggcatgaattcctatacgttaagcaaggcatttaagcaagtgaccggcattaattttatcgattatgtgacccagatcagaatcgaaaaggcgaaagaactgctggtcaatacgaataaaaaaattcatgatgtgtctgaagaagtcggctatcgccacaattatttcaatcggatttttaaaaaacaggtcggcatgccgccgggtgtcttcaggcaaatgtatcaggaaacgccgtgaaaggagagaacatgtgatgaagaaaccgattcaagtatttttagcgggggattccactgtgagtgactgcccgcctcatgaagcgccgatggcggggtgggggcaggtattcgggcaattgttttctgaaggtgtgctggtccgcaatcatgccaaaggaggagcgagcaccaattcttttgtggaggaaggaaggcttcaagcaattgccgagcacatcacacaaggcgattatttgttgattcaattcggccacaatgaccaaaaaccgcgggggacgaagccgtactccacatttcagcagtttcttaccttgtttgcagatacggcacgcgaaaagggcgcgcatcctgtgttcgtcacatcggtgcagcgccgccgctttgatgaaaacggacggatcgagcatacgctcggtgagtatcccgatgcgatgaaagcactggcgaaggagctcgatgtacctgtgattgatctgcttgcgaaaacaaaggtgctgtatgaagcatacgggccggaggagtcgaagcgattgttcgtttggtttcagccgaatgaacatccgaattacccggacggcattgaggacaatacgcatttttcggaaaaaggtgcaatggaggttgcgaagcttgtggcagaaggcattgaagagctcggacttccgcttaaggaccaccttgtgagccgggagggaaaagaacatgtataaggaaggcgcttgcttgtaccgcaatccgctccggtctaaaagcgatgtgaaggattggcggatggagggaggcggacagatctcatttgacgatcacagcttgcacctgtcacatgtccaggatgaagcgcactttgtcttttggtgtccggaaacctttccagacggcatcattgtgacatgggacttctctccgatcgagcagcctggactgtgtatgctgttttttgccgctgcgggtattcgcggcgaggatttgtttgacccaagtctcaggaaaagaacaggaacataccctgagtatcattcaggagatatcaatgccctccacctgtcgtatttccgcagaaaatacgcggaggaaagagcgttccgcacctgcaatttaagaaaaagccgcggtttccatctcgccgcaatgggggccgatccgctgccttctccagacgacgctgattctccgtatcgtatgaagctgatcaaagacaaaggctatgtgcacttttcaatcaatggtctgcccattcttgagtggatggacgacggcagcacatatgggcctgtgttaacaaaaggaaaaatcgggttccggcagatggcccccatgaaagccgtttacagggattttgccgtgcatcaagcggtgagaagatgaagacgactgtaacggatgcgctttatgcaggctgcgaagcggtggtgaaaatagcatggctcaacgggctgtggctgttgtttacacttttgggcggcgttcttttcggatgggcgccgagcacagctgcgatgtgtgccgttataaggaaatggctgatggggcaaaaggatgtcccgatattttcgttatttctcgatacctataaaaaagagtttctcaaggttaatgcgatcggattggcgttttcggctcttttgctcatattgtctgccaactatcattatttttctgccagtacgaattggctgtcctttgccgtaacaagctgcacgctgcttgcagggcttttgtatatcatcgcgctgatgtatgtgtttcccctttatgtgcattaccagctcccgcttcgcaaatatattccgcaggcactgctgtttggcgccatgagaccgctgacaactggctgtatgctgatcgggtgcggatttgtcctttatttgctgtatacgcttcctggcctgatcccattttacggcccgtgtttatttgggcttgtgttgatgttttttgctcttaggggatttcaaaagacggaggcccagcaccatcaagccgggtaacaaaaaaatgacaaataagcaaaaaagtgcagtgtccgaaataggcagatgcaaaaaagtgaaattgaagacagctcacaaagcgcataaaatccaatttaagtaagcgcttacagataaatgagaaggagctgtctgatgattagacgaaggaaacgcatgtttaccgctgttacgttgctggtcttgttggtgatgggaacctctgtatgtcctgtgaaagctgaaggggcagcgcggcagatggaagcgctgaaccgggggcttgtagcggtcaagacggacgggggcatttttgtcagctggcggtttcttggaaccgaaaacgcatctgttttgttcaatgtgtacagagacgggcaaaaactgaatgctgcgcctgtcaaaacaacgaactatgtggataaaaacggttcggcgggctcaacgtatacggttcgggctgttgtaaacggtaccgaacagccggcttctgaaaaagcctccgtatgggcgcagccgtatcattccgtcccgctggataaaccggctggcggcacgacgccaaagggtgaatcttacacgtacagcgctaatgacgcaagtgttggcgatgtggatggtgacgggcaatacgagctgatcctgaaatgggacccgtccaactcaaaagacaattcacaggatggctatacgggtgacgtgctgattgacgcgtataaactggacggcacaaagttatggcggatcaatctcggcaaaaacatcagagcgggcgcgcactacacccagtttatggtgtatgaccttgatggtgacggaaaagcagaagtggcaatgaaaacggcagacgggacaaaagacggcacgggcaaagtaattggaaatgccaatgcagattacagaaatgaacaggggcgtgtgctttcaggccctgaatatctcactgtgtttcaaggttcaaccgggaaagagcttgtcaccgcaaattttgaaccggcgcgcggcaatgtgtcggattggggagacagctacggcaaccgtgttgaccgttttctcgccggcattgcctaccttgatggacagcggccgagcctgatcatgaccagagggtattacgctaaaaccatgctagttgcctataacttcagggacggaaagctgtcaaagctttggacgctggactcctcaaagtcaggaaatgaagcgtttgccggacaggggaatcacaacctgagcatcgcggacgttgacggggatggaaaagatgagattattttcggctcaatggctgttgatcatgacgggaaaggcatgtactcgaccggcttaggccatggggatgccctccatacaggagatcttgatccgggccggccggggcttgaggtgtttcaagttcatgaggacaaaaatgcaaaatacggcttatctttccgggatgctgcaactggaaaaatcctttggggcgtttatgccggcaaggatgtaggccggggaatggctgctgatattgacccgcgttatccgggacaggaggtgtgggcaaacggttctctctactcagcgaaaggggtcaaaatcggaagcggggttccgtcctcgaccaacttcggcatctggtgggacggcgatctgctccgggaacagctggacagcaaccgaattgataagtgggattatcaaaacggcgtatcgaaaaatatgctgactgcatcaggcgcagcggctaacaacggcacaaaagcaacaccaacgcttcaggctgatctgctcggtgactggcgcgaggaagtggtgtggagaacggaggacagcagtgctctgcgcatttacacgacgaccattccgactgagcacaggctgtatacgctgatgcacgatccggtgtaccggcttggcatcgcctggcaaaatatcgcctataaccagccgccgcacacaagcttctttttaggagacggcatggcggaacagccaaaaccaaatatgtatacgccttaactgaaagggggaaggaacgggctgcgcgcagcccgttcccatcaaatgaaaccaaaaaagaggcaaatggaatacctgaccagaggtttgattgcggtacagacagaacagggcgtgtttgtcagctggcgttttctcggcacggatcatgagacgacggcttttcacctttatcgggatggaaagcggatcacccgcgatccaatcgctgaaagcactaattttctcgatcaaaacggaacggctgactctgtttatcaagtggcggctgtcaataaaggacgggaagaaaagctttccaagaaagctcgtgtttggcaggaaaatgtcctggaggttcctcttgccaaaccggaaggcggtgtgacgccggacggaaagccgtacacttacagcgccaatgatgccagtgtcggggatatagacggggatggagaatatgaaatgatcctgaagtgggacccgtccaattcaaaagacaacgctcatgacggttataccggggaggtgctcatagatgcctataaactggacggcacctttttgtggcgcatcaacctcggcagaaacatcagagcgggtgctcattacacgcaatttatggtgtatgaccttgacggtgacggaaaagcagaaatcgccatgaaaacagctgacggcacaacagacgggaaaggacatatcatcggtgatgagcaggccgattttagaaacgaacagggcagaattttgtccggtccggaatatttgaccgtgtttaaaggagaaaccggtgaggcgctcacgaccgtggaatatgaaccgccccgcggcaagctggaggattggggagacggctatggaaaccggatggaccgttttctcgccgggaccgcttatttggatggggagcggccgagccttgttatggcgcgcggctactatacgagaaccgtgctcgtggcatacgatttcagaaacggaaggctcaaaaaacgatgggtatttgactccaaccagccgggacatgaagcatacgcaggacaggggaaccacagcttgagcgtggcggacgtcgacggagacggaaaggatgaaatcatatacggcgcaatggctgtcgatcatgacggaaccggcctgtactcaacgggcctcgggcacggagacgcgatgcatgtaggggatctggacccgtcacgaaaagggcttgaagtgttccaggtgcatgaggacgccacgaagccgtacggactgtcgctgcgagatgccggaaccggtgagatattatggggcgtccatgctggaactgacgttggccggggcatggcggctcatattgatccaagctacaaaggatcgctcgtctggggaattgatccgccgggcaatgatggcatgtcgtacgggcttttcacgagcaaaggcgaaaaaatcagcgacaaagcgccctcttcagccaatttcgccatctggtgggacggtgatttggtcagagaactgcttgatcatgactgggacggaacgatcggcaggccaaagattgaaaaatgggatgctgaaaacggctgtctgaagacgatatttcagccggccggcgtgttgtccaacaacggcacgaaaggaaacccggttcttcaggccaacctgttcggagactggcgggaagaagtgatatggagaacggaagacagcagcgcgctccgtatctatacaacaacacatctcacccgccactgcttttacacgctgatgcatgatccggtttacaggctcggcatcgcctggcagaataccgcctacaaccagccgccgcacacgagcttttacctcggaacgggaatgaaaaaaccgccgaagcccgccctgtacatagcgggaagcaaagcggaggcgccgctgtaggaggactaagggataagacgcaaaggctgaacgctacgccaagatgattagagaactggcaggacgaaccaatgctcaagcgctgtacgcaccggttttttcaagggaagagctatccgtgatggaagctgtataaaaaacgaggaggaatgaaaaaatggcaaatcatatttatcttgccggcgattcgactgttcaaacgtatggagacagcacaaatcaagggggctgggggcagtttctcggctcgcatctgccggagcatattcaagtgatcaacagagcgatcgggggaagaagctcgaaaacatttgtggaagagggcaggcttcaggcaatcctcgatgtgattgagccggatgattggctgttcgtgcagatgggccataatgacgcgtcaaaaaataagccggagcgctacaccgagccctatactacttataaacaatatttaaagcagtatatcgcaggcgcgcgggaaaaaggcgcccatccgcttctcattacccccgtagcccgctttcattacgaaaacggcgtgtttttgaacgattttcctgattactgcattgccatgaagcagacggccgctgaggagaatgtccagctcattgatctgatggagaaaagtctcgctttctttactgagaagggcgaggaaaaagtgtacacctattttatgatttcagaagggattaacgattacacgcattttacaaaaaaaggcgcaaatgaaatggcgaaacttgtggcaaaaggcataaaggagctcggcctgccattgacagaatcgatcatcaaagaaaggtgaaaatgtgatgagaaaactgtatcatggcgcttgctattatccggaattatgggatgaagagacgattcagcaggacattgacatcatgcgtgaagttggcgtaaatgttgtgcggatcggcgaatttgcctggtcagtcatggaacctgaagaaggaaaaattgacgtcggttttttcaaagaaatcatcgcccggctgtatgatagcgggatcgaaacgattatgtgcacgccgacgcctaccccgccgatttggttctcacatggccggcccgaacgcatgcatgccaatgaaaaaagagagatcatggggcatggctcccgtcagcatgcctgtacgaacaacccgtatttccgaaaaaaagccgccatcatcaccacagccatcgccaaggagcttggccggctcccggggctgatcggatggcagctagacaatgagtttaaatgccatgttgcagaatgcatgtgtgagacatgcttgcgcctatggcatgactggctcaaaaatcgctacggggtaattgagcgcttgaatgaagcttggggaaccgatgtgtggagcgagacctatcagacgtttgagcaagtcccgcagccgggaccggccccgtttctgcatcatgcctctctacgcactatgtatcagctgttttcgatggagatgatcgcttcgtttgcggatgaacaggccaaaatcatccgctgctattcagatgcgccgatcacgcataacggatcagtcatgttcagcgtggacaatgagcgaatgtttcagaatctcgattttgcctcctatgacacgtacgcttcgcaggaaaacgcctctgcctttttattgaactgtgatttatggagaaatctgaaacaagggcgcccgttttggattttggaaacgagtccgtcgtatgccgcctcgcttgaaagctccgcttacccgcacgcagacgggtatttgcaggccgaagccgtatcgtcctacgccttagggagccaggggttttgctactggctatggcgacagcagcgttcaggcagcgagatttcccacggttcggttctcagtgcctggggcgaacccaccatcggctatcaaaatgtgctggcggttgagcgggcaagaaaggaaatcgagcctattattctatcgactgaacccgttcaagccgaggcggcgatgacttactctgacagagcaaaagcatttattaaaactgagcctcaccggggactccggcatcgttcgcttgtgacgcatttttatgaacgtattctcaacacggggattcaccgtgaccttattccggaaggcgctccactggacggctatcgcttgctgtttacgccatttgtgccgtatttgtcttctgaatttatcaaaaaagcttcggcattcgctgaagcgggcggcatctggatcaccgggccgctgacaggaggacgcacatgcgagcataccattcataccgattgcggacttggcgaacttgagaaaacgtcagggatcaaaacactttttacctttccgatgaatgagaacgtgaatacaggaaaagcgtttggcatcacggcgccgctcggactgtggagcgcggtgtttgacacagagagcggaaacacccttggcacggttgaagcaggaccgggggcgggccatgcttttctgacggaacggaattacggcgaggggaaaattgtcatgctgggctcgcttccatccgggaaagaaggggatgcgatgctggaagcgctcgtcaggcattatgcggaggaagctgttatttccagccggtcggatgtgacacccggcacgatcgttgccccgcgtataggcgaaaacggccttgtgtggatcgttgtgaatatggatggaaaaggcgggagcgtgacattgccggaatcgggaacggatttgttgacgcaccgcttggaaaaggcggggagactggcggtcggaccgcatgaataccgtgtgattcaatttgacaatcacagctgattctttgtatcgaatcagcttttttctatggagggagagacagatgaaaaagatcaaatggttatcaggacagccaaaggtgacaagcggcgtgacgtggggcatgccatggaaaaaaggagaattaaaaaaaggagaccgtctggcgcttatgaatgaaaacgcggaaacgcgatatgtgcaaagcgaaccgtcggcctattggccggacgggagcatcaagtggacgaagcacgcggcggtgtttggcggtcaggaaaaccaaagctttacagtgcacaaaagagaagtgccgcagccaactgaatcgctcagcattcttgagacagagcatgatatccaagtggatacaggagcactcgtttgtaccattcataaaacaggatctgatttcattcaatcattgcagatcaatggaaagccgatcgccgcaggcgggaggctcgttgcgataagagaaacgagaaaagagtcagcggcgaaaatggttcttttgcatgaaaggtctgtcagctttatcaaacgggcggcgattgagcagagtggtcctgtcaaagcagtagtcaaaatcgagggagtgcatgtgcttcataaaacgtatgaggaatggctgccgtttgtcatccgattaacgttttatgccgggctgtctgagatcggccttgtgcacacgcagctgattgacaggagcggtaaactagaattcgttaaggggctcggcatcgaattcgacctttttttggagggagagccgtacaaccgccatttccgctttgcgggagagaaagggatgtataaagaacccgcccagctgtttggcacacgtaaattcaatgaacgatatccgctttatgaaaaacaaatcaatggcgaaatgctgtctccagatgaagagcataaggaatggtttgcacatggcacacagaatgcggtttgggacgatgtcaagatcgtgcaagattccagcgatcattacagcctgtcaaaacggaccggaaaagattatgcgtgggttggaatgctgcatggcagccgggcgaaggggctctgctatgcgggcggaaaaaatggcggtgtggctctcggcctgcggtatttctttgagaaatatccttcagcactggaaatcacaggtcttgccggcagccgccccaaaatgactatctggctttggcctccggacggcgaagcgatggatttgcggcattatacaggaaacactcacgtggccagcgcgtatgaaggctttgatgaaatgcgctctgatccgacaggcattgcgaacacaaatgaaataagcctggcgtgcttttcgcacatgccgtctgacgaagtcctcaatgcgctggctgacaaatggcaggcgcccccgctcattgtatgcgagccggacgtctattacgaatcaaaagcactcggggtatggagcatcattgacacatcccatccgctcaaaaaagagctggaagaacagcttgatgcggcctttctgttttataaaaaggaagtagagcaacgcagatggtacggtttttggcattatggcgatgtcatgcatacgtatgacccgatccggcatatgtggcggtacgatctcggcggatacgcatggcaaaacaatgagctcgttccgaccctatggctgtggcaggcgtttttccgctcaggcagagaggatatcttccgaatggcagaagccatgacccgccatacgagtgaaacggacagctttcacctcggtgaatatgccgggcttggctcacggcataatgttgtgcactggggatgcggctgcaaggaagcgagaatcagcatggccgggcttcataaattctattattatctgacgggtgatgaccggacgggagatcttttgacagaagtgaaggatgccgattatgcccttgtcaaaaccgatccgatgcgcgctttttacgagaaaggcaagcacccgactcacgccagaacgggaccggactgggcggcgttttgctcgaactggctggcggaatgggagcggaccgaaaattcggaatatctcaaaaaaatcgaaacgggaatcaactgtctgaagcggctgccgctccgcttattatctggcccgacatttgaatatgatccggcgacctcgatgcttcatcatatgggagacggcattgcgggcggatatcatatgatcattgccttcggcgcgccgcaagtgtggatggagctggctgagcttcttgatgactgggaatgggaggatatgctgagtgaattcggcgaattttacacactcagtgatgaggaaaaacgaaaaaaaagcggaggcgctcttcatgacgggcattttcactggccgatgttcgccgccggtatgacagcctacgccgcaagaaaaaagcaagatcctcatctcgccgccaaagcgtggaatcttttgctagaagataagctcagccatacgccgcttccgatcaaaccggagcgcatcgagacatggacgcagctagaggagcttccatgggtgacaacgaacactgtctctcaatggtgtttaaatgtcatagcggcgctggaactgatcggagattcccttccggcaaaaaaagaaacatcgggcaaaaaaggataacagccggaatttcataggagaaatggtgcaaaaaatgaagattgcaagaatttatgtaagcgctttatattgagaggggcaaaggggaaatgcaaattgaaaaaagggggacttacgcaacatgaaaataagaatgcgaaaaaaatggatggccttgccgcttgctgccatgatgatcgccggatgcagccattcggaaacatccaattcagcaagcggttcgaaagatacgatcaaaattatggcgccgctcttatcgccggaaagcccaagtgataagagcccttcattaaaagcgctcgaaaaatacacaggcaaagagattaaggtcacatgggtgcctgattcatcctacaacgacaaattcaacatcgtcatggcttcaggagagatgcctcacgcgattgtcattaaagataagtcagccggctttatcaaatctgtcaaagcaggggcgttttgggagctgtctccttatttaaaagactacaagaatttaagccaggcagatgaaaagattttgaagaacagctcggtgaacggcgaggtgtacggaatctacagaacgagggatctgatcagggcgtgtatgatcatcagaaccgactggctgaaaaatgtcggtctggatatgccggaaacgcttgatgatttctatgaagtgctgaaagcctttaaggaaaaagatcctgacggaaacggcaaggatgatacgtacggcatggtcgtgccgaaatggatgggactcggcaacggaagcccatgggatgttctgcaaatctggttcggcgctccgaaccgctacggtgttgaaaacggaaagctgattccagattttacaacgaaggaatacatggatgcgctcacgttttttaaaaagctctatgatgagggcttgatcaataaggactttgctgtcatggattctgcgaagtggaatgatccggttgtaaaaggaaaagcgggtgtcatcgttgatacaggctcaagagcgtctcaaatccaaagcgcgatggaggaggcggatgagtcgaacaaggatatcattgatatcgtcggctcgcttgagggaccgaatggcaagcgcaccttcccgacatctggttattcaggcatgatcacgataccaaaatcaagcgtcaaaaccgaaaaagagctgaaagaggtgctgtccttcctcgataagatgaatgataaggaagcgcagattctcacgaacaacggagtgaagggccgcaattacgagctcaaggacggcgtattcacctcacttgaaaaaaacaataaatctctcctgtatgagcatgaaggcttggcacagttcagcatgtcgattccgaaaagcgagtattacatcgaagaccagaaaaccaagctcttccagcatcgcaaggacatcataaccgaaggagaaaaaatagccgtctttaaccctgctgagtcgcttgtatctgatgtctatacccaaaaaggagcccagcttgacaacatcatcctcgacgcgagaacacaatttatcattggagaaattgatgaaaaagggttcgatgatgcggtggagctttggaaaaaaagcggcggcaatgaactgatgaaggacttgaacaaattgtaccaatcgtcaaaataaaccgatgcgcctgcctttcggcgggcgccccggtatcacgaaaggagaacagatatggaaacagtgccgaagaagagagatgcacctgttctcaccgctggaaaaggcatcagctggatggctgcgctcaaacgggacaaatggctttatcttcttcttattcccggtctgctttatttcttgattttcaaatacttgccgatgtggggtgtgctgatcgcttttaaagactattcgccatatctcggcttctggaaaagcgaatgggtcggctttgattatttcaaagacttttttatgaatccggattttttccggctgctgcgcaacaccctcatgctggcgagtctggatcttttgtttgcctttcccgcgcctctcattttggctctgcttttgaatgaggtaagaaaggccgtgtataaaagatgtatccaaacctttatttacgtaccccattttgtatcatggacaattgcggtcagcatcaccttcgttttctttactgtcgatacaggtgtgatcaacaaattgattatgagcctgacaggtgagcagatttctttcttgtcggatgcagactggttccggccaatgattgtgatgcaaagcatttggaaggagacaggctggggaacgattctatttttggcagcgcttgctacggttgatcaagagcagtatgaagcggccatcatggacggagcggggcggttcaggagaatgtggcatattacgctgccggcgattagaagcaccattatcgttttgttgattttaagaatcggcagctttttgaatcttggctttgaacaggtgtatttgatgacgaactcactcaaccgcagtgtggctgacatcttcgacacgtatgtgtacatgatggggattacccaaggggcgtatagctacagcacggcggtcggtttgtttaaatcagttgtcgggattatcttgatttttggcgccaattacattgcgaaaaagtttgatcaggaaggattgttttagaggagggagaggtatggctgaaattcacacgatgcacaacaccaaagccggacgggtgtttgacgtctgcaacattctgtttctcggcggtgtcggcgcgattaccattttgccgtttttatatattatcgccggttcctttgcgacagaagcggaactcgcccagcggagcttctttattttcccgaaaacctttacacttgatgcttacaagtatgtgttttcgacaccgacgttccttcgaagcatgggcgtgtccatcttcatcacggtggttgggacggctgtacagctgttttttaccttcacgatggcgtatccgctggcgaaacggcatgtgaagggacggaatctgctgttgaatctggtgattttctccatgctgttttcaggcggcatgattccgacgtaccttgtcgtaaaatcacttggccttttggatacgtattgggcattgattctgccgatggcgattaatccgttcaaccttattattatcaaaaacttctttcagcagctgccgcgcgagctggaggaatcagcaaaaattgacggctgttccgaaatcggcgtcttctggcggatcgccctgcctctgtcaaagccagttattgcgacctttgcgctgttttatgcggtcgggatttggaatgatttcttccacgctctcttatatatcaatgacagtgcaaaatggccgctgcaaatggtgcttcgccaagtcacaattttatcggatttaacggcgaccaatggtgatacgatgcaaaatgcagttccgccggagcagggaattaaactcgctgtcattgtcattgcgacgctgccgattttggcggtctatccatttttacaaaaacactttgcaaaaggaatgctgatcggttcggtgaaaggctgagaaagggagtgtttcatatcagtacattagatcagattaagattgcctatatcggcggggggtcccaaggctgggccagaagcctgatgagtgatttgtcgattgatgaacggatgtcaggcacggtggcgctctatgatcttgattttgaagccgctcagaaaaatgaagtgatcggcaatcacagcgggaacggcagatggagatatgaggctgtttctactttgaaaaaggcgttatcagccgcggatatcgtcattatttccattttgccgggatcactggatgatatggaagtcgatgtgcacttgcctgagcgctgcggtatttatcagtctgtaggtgatactgtcgggcctggagggatcatcaggggcttgcgtgctgtgccgatatttgcggaaattgcccgggcaataagagactacgcacctgaatcatgggtcattaattatacaaacccgatgtctgtctgtacaagagtgctgtataaagtgtttcccggcatcaaagcgattggctgctgccacgaggtattcgggacgcaaaagctattggcggaaatggtcacggaaaggctggggattgaggtgccgcggcgtgaggatatccgcgttaatgtgctcggcattaaccattttacatggatcacaaaagcctcttaccgccatattgacctgttgcctatattccgtgaattcagcgcgcactatggggaatcaggatatgagctggagggggaatgctggagggacagcgtcttttgttcggcacaccgtgttgcgtttgatttatttgaaacgtatggcgccatccctgctgcgggtgacaggcatctggcagagtttcttcccggcccatacctcaaacagcctgaagtatggaaatttcatctcacacctatatcattcagaaaacaagacagagctgagaaacgacaagaaacagaacggttgatcgtgcaacaacggggcgttgctgagaaagcttcgggagaagaaggcgtgaacatcatagcggctcttctcggattgggtgaactcgtcacaaatgtaaatatgccgaatcaaggccaggtcttaaaccttcctatacaagccattgtcgaaacaaacgcattcatcacaaggaaccgtgtccagccgattttgtccggagcgcttccgaaaggtgtggaaatgctggcggctaggcatatatccaatcaggaggcagtggcggacgcaggtttaacaaaggatactggcctcgcgtttcaagccttcctcaatgacccgcttgtccagattgaccgcagtgatgcagagcagcttttcaatgacatgctccaatgcatcatgcaaagctgagcttgccgattagctctttccggtttagaaaggaaagcattgaccatactgatagtataatcaagaagtaggtgctatcaatatgggaaattatttaagtgttgcggtagaactggtctgcggtttaggcattttatttatcatcttaaagcttctcgggaaaacccaattttctcaaattacgccgtttgactttatttctgctttaattttaggtgaattggtcggaaatgccgtctacgatcatgaaatcaaaatcaaagaaattatttttgcttcgctattgtggggcgtgctgatttatattattgaatttatcacgcaaaaaatgaaatcatcgcgaaagttcttggagggcgagccgaatatcgtcatccgcaaaggggagcttcaatataaagtaatgaagaaaaataagatagacattaaccagctgcaaagcctattgaggcaagctgggagcttttcgatccaagaagtagaatatgcgattcttgaaacaaacgggatggtcagcgtgcttccaaaatcagactttgacaaaccgacaaataaggatttgcagattccttcgaagtccgtttctctgccgatcacgttaatcatagatggagagattgtgcgggataatttgaaggaagcaggtgtggatgaacagtggctgaaacaagaattgaaaaagaagaacattgataagacagaggacgtgttatttgcagaatggcataaaaataagccgctgtatactgtaacgtacgaacaaagcagatcaacatgactcttagaaaaaagcttgcagcaaggcgcaagctttttattgattgtatgtcccttgtttgacagcacgtacatggtacatgctcacttcagtgctgatcagatagtcaggctttggtttgcctttgtttgctttatggccggcgatatgcgcatcgcttttttcccattgcttccagtgatcctctgattcccagcgaatcatgacaacaacttcttcatcaccgcggcgcacatttttctcaagcactgtcacatcaattaaaccttcttgtttttcaatgattccttcagcgctgaaacgttctatgactttatctgcaaagccttctttaaccgtcatttttctcaactgtacaaacatttgtctcactccaatcattctcacatatgaataattgtaaatgaaattcattctcaatgtcaaagaaagcgcagggcggaatcgaaccgccgtgcgcaacagtttattcttttaataaaaacacatttccgtcttcgtccttaaattgaacgaaggtgccccactccatttgattgggctcaccgagaaattctacaccgtttgtcttcattttctcgtatgtaccaaagatgtcttcgcattcaaacacaatagaagccttcatttgctctgagcctttcatcatggctttcgggtaaatgactaaacgagtctcggctccttttggcgcaacctccagccagcttgcttcaggtcccattgggtgatccgctgcaatatcaaagcctaccttctctgtccaaaattgcttcgctttctgctggtcctcgacatatacagcaacagtgccaatttgtttgatcatagggaaacctccaagttgaaaagataataatactataacctgtttacggccgaagtaacataaaaaaatcagccgggaaaccggctgattattaaaatgagcagcttacaacatcgatgtgatttgtgtctaaggcgaaataaacccagcggcgccgtgaggaatcccaataaaagccgccgacggatcttctgccaaggatgatcgggtaaaaccaaaatgagcggccattggttaaccagacataggtaaatcggaaaaggcaaggacgaatggtgattggttcaactaacaaaacggctccttgagaaccctgcggttttgggggtttcgctggtatttgggaaggaggaggtccctgcggcgcaccgccgaagcctgggctggcaccgctgccaataccagggccggagccgccgccaaagcctggaacagcaccaccgccaatgccaggaccggagccgccgccagagcccggaacagcgccgctgccaatgccaggccatggatatcggtattcatattcaaaagcaggccaaggctcataaaaatgccccgcaaacatataaggatcaacataatacatgtgataacgtcctttctcattgtaaactgtacattgcagtttatgcgggcggactcttattggtgcattcgcctaaggatatgaagctggaatgctctcagagagcagaatcatttgatttttctctagtcttattcacaattccgatttatcattttataatgaaagtgcttctattacgaaaaaggagacagaccgtgaatatcgatcaattattatatcaatatatcatagacaacactgcggatattactgagaaatggttcagtttgcgttgccagctaaaaggcgagctatattccgccagccatttaagtgaagaaacgaaaacacttttaaccgagcagcatacatttaccaatataacaatcgcaagcgcatttctggaggatcaaaccgattttcaagaaaacatgacaaaatgggcgcaaaacgttgcgaaaaacagggtagagcaggatgttcaagtgcatgaggtcgtagaagccatatccaattcaagaatctcattctgggacgcagtcgccacatttataaaagagaatcaggagattgtgacaaatgaggatgcagaccgatggaaccgcattgtgaatcagtcgttcgataagctgattattgaattctccgagcagtaccaaaaattcatgctgatgaggcttacatctcagcaggaactgatctcagagcttggctgcccggtcatttccattgccgatggaatcgggatattgccgcttatcggctccattgatacaaaacggcacaggtcattttagaaacagtgccggtccgctgtgtcgagagaaaaatcacaagcctcgtcgttgatctttcgggtgttccgattgtggataccatggtggctcagcaattgtacaacctgtctaaaacacttttcttattaggcgtcaaagccgtattttcaggaattcgcccggatgtggcccaaacatcgattcaattggggcttgattttagtgaatatgaaacgtacggcacgctgaagcaggcattagaaaacatgggtgtccgctgtattgttgaggaattggaagaaaacaaataggaagtttccaggcatatgattgtccgtcaccgggtgatcatatgcctttttgatttgaacagaaatcaccattgatttatcgaaaaaaacataatattataattcttataagaatactgtgaattaaaacctattcaacagggggaaggtcttttggtttctaaatcaacgattgatccggaagtgattgaaaaaatcatcagctcgctggaaacactcgatttcggcacggttcagattacggttcatgattctcagattacccaaattgagaaaatagaaaagcaccgtttttcgctgaaaaggaaagaatcaaaatgataatgtaaagggcgtttgttttcattaaattctccttaaaacatatacatatttcatccaatttttatataatagacctttaagatcattttttaggaggatttttgacatgcaagctacggttcacgagagtaagcaatcgatcatgcaacgcattttgacagtctttgtcttcacattgctgatcgcgactgtcggcctttttatcggccaatttgttcctgtcgctttgatgctgccgctttctattcttgaagtggcgatgattattctggccttctggatgcgcagaagaaaagcggtcgggtatgcgtttgtatatacattcgcgttcgtttccggcattaccttatttccgatcgtcagccattacgcttccatcgccggcgcctatgtcgtgctcgaagcctttggctctacatttgtcatttttgccgtcttgggcacaatcggcgcaaaaatgaagaaggatttatccttcctgtggtcgtttctgctggttgcggtgctcgcactcgcagtggtagggattttcaacattttcagcccgttaaactcagcggcgatgatggcgtattccgtgatcggaaccatcgtcttttccctttacattttgtatgatttgaaccaaatcaagcaccgccacattacggaagacttgattccggttatggcgttatcgctgtacctagactttatcaacttgttcatcaacctgctccgcttcttcggcattttgagcagtgatgattaatgaaaaagcgtctgtcattggataggcgctttttgccatacatcaaaaaggcaggtggagtattggtgaaaaaacaaatgggcgcatatgtatctctggcagcagctatggcgatcgtcggcagttctgtcgttgtcggcaagctgatggtcgaacggattccggtctttctttcctcaggattgcgttttttgatcgcttctgtcgtattgctcatgctgctgttttgcattgaaaaagggtttccggctttgacgaaaaaagatgtgttcgtattactggtgcaatcattcacaggcgtgtttttgttcagtatttgcctgctgtatggggttcaatatacgacgggaacggaaagcggcattttgacaagcacaacccccatgttgatcggtattttatcctttttcctgctgagagaaaaaattgagaaaaagacgctgatcggcattttgctggcggtttgcggcgtaatggcgattaatttgtttggagccgggagccaagacgggacgccgcacgccttattcgggaacatgctgatcattgctgcagtcattggcgaagcgttgtttacattgatggccaagctgctatccccgcatatttcggcactggcgatttcgaccttcgtatcgctcttcggcttcctgttttttctcccgtttgctttgtttgaggcctcttcatttgattacagcgtgccgactgttttggattggtcgtatgtgctgtattacgcgctttttgtcactgttttggcgttttacttatggtatagcggggtgacgaaggtgccggcgggtgtatcgggcattttcacatccgttcttccggtctcagctgtcattttgtcaggcgtgatattgaaggagccatttgagtttgtgcatttcatcggcattgcatgtgtcatcggcggcatatttgttacggtcataaagaaaaaacagccggatgcgtatccggctgcagaagaaaagacgctatagcctgtccggatcggacgggttttttagtctttaaacacgctcagcctttcaaaaagatcaccaagcatcttcacgaacatgtctttttcctcgtcgctgtagttttccatgacagcggatattttgctgaaatggccgggcagaaattgctccaggcgtgctttgccttctgttgtcagttcaatgctgatttttcgtttatcctctgtgtgatgcctgcggctgacaaaaccgtctctcgccagcccgtctagcaggcctgtaattgttgctttcgtgacatttgaccgcttggcaagctctgtcggacttaacctatgatccttggcatcaaagagcagcatcaggattttgaattttccttctgaaagccctcggccagcaaagtaatgctccatcacatgattcattttttttgaaatatcaaaaagagataaaaacaattcaagagagccggcgtcaatattggcatacgtttcggcgtgctctgttatatgcttatatttcggtaaatgttttaattccatcgcaattagctcccgtacattcgttgtgacacgattataaaggagggaaaaccataacgcaacttggcttggagatgattgacagcttttcttgggacatagtaaggtaatatagttaggcgcctaactaatacatatagagctgaaaaggtggttattgatatgaaacatatgttaatagcaggaggcggaatcggcggcttgtcagcggccatttctctccgtaaggcagggttttccgtcaccttatgtgaagcggcttcagaaaatcgaaaaacaggtgcggggattcttcagccgcaaaacgcactggcggtgttgaaagaactgggcgtattcgaagattgctgtaagcacggctttcaaacagaatggtttaaaacgtttgatgaacaggggaatttgctgtttcaagtcagtgaatcctttttagacgattcacttccgggacgcaataatatcctgcgcaaaacgttaaatgacattctcatgaagcatgccgaggcagtgggtgtagacatcaagtgggggaaaaaggttgtcgcctatgaagaaactgctgaatcggtcactgccttatgtgaagatggagaaaagatgcaggctgacattctggcgggctttgacggcattcactccgttgttcgtgataagatgctgcaaaaggaaacggaaaaagagcatctcggcatgggagcgtggcgcttttatatcgaacttcctgattacacattcgaggacgcaacattcatgtatagaagcggagacacacaaatcggggtggtgccattggcacaacacgctggctatgtcttcgtcctccagccttgcacgagcgattactgggatgaggaagatacccggtttgatagagtaaaagagattctttctggttttcgggggctggattttgtcacaaagcacatgtcaaaacagcatcctgtcatctttaacaaactggagcaggtcgccgtgcaggagccatggcataaaggccgcgtcatcatcggaggagacgccgcccacgccggtgcgccaaccctggcacaaggagcggcaatggcgatcgaggatgccatcgtcctcgccgaagaactccaaaaccacgccgaccacgaaacagcattacaggcgtactataaaagaagagccccacgagcgctcaaagtccagaacctatcatctgaaatcgtccgccgcaggctgaaaggagagccgggagcggaagaactgattggggagtgctatgcggtgttgagggaagggtattaaataggaaaagtccagaaagtgatttctggactttttagtcttgctctgttttattccttatccgctcaatcacctcatgcagcccctcaggcttataaaactccaccggtgaactgcctttctcaaacgaaatcgtctcggcttcaatcagcgcgacatagcgcccgtttacttttgcgagatgaatagaatcgccaaaatccgctagcaatcccttaatctctgtttctccgactttcattttcagctgggcctctggcgtgtgctcgatgatttgggcggaggcttcgatgacttgatgggtgtcgaggcgctcttggatttcccgtttttcgcttgcttcccaaatctcaatgtcgtgctcgaactgcttgagttcttcgctgttgtcttcaaatgtctcgtagacgtgctcttgtaccatgttcatgacctgatttttcatgatttctggcatcgattctccgtactcgacgaatttcagaaagtcctcaaaatagcgggcgtgcgaggcctggtggattttcagttcaccttcctcgaccattccttcctctggcatgtacgggtattggatgcttttcatgttttttgtcgtgatcgccatttcgacttttttaatgagagaagacgcgtcagagatgcgggcgaccttcggctcaaaatcacatttcataatgaagacaaatgactcatcaaagtattttctcggcacggccgaagcgacgagaaacacgccgccgcgaaccgcgcttgtgtcaaggtacgtgcggacgaactgctcgctcagctcattgaagtcttcttttgtttccgccagacgcgcgcggttgaacatgttgtagtttgggttggaatcgagctcgtggccgggctcgacgataaaatggccgattttcgtcggcacctgctcggactgcggatggcggtcggctttccgtttaacgatttttttcagttccccgtcgagaaagtccttcagctcgctttcttcaaattctcccgtatcaagggtctggaagtgcttgaactgcttgttcgcctgctcatctttgccttccacctgtatgacataaaaggataaaaaccgaatttcaaaatccatatataaactcaccttattcgcgtattgtacagcttctcaagtatagaaaaaacagcgatcatgcgtcaattgggagaacggaataatcatgaccatgaaagggaaatgtagtcaaatagaaggcatttcatacggaaaggaatggttcgatgaaggaaacaagcccgattcctcagccgaagacgtttgggccgctcggcaatttgcctttaattgataaagacaaaccgacgctttcgctgatcaaactggcggaagaacagggcccgatttttcaaatccatacacccgcgggcacgaccattgtagtgtccggccatgaattggtgaaagaggtttgtgatgaagaacggtttgataaaagcattgaaggcgccttggaaaaggttcgcgcattttccggtgacggattgtttacgagctggacgcatgagcctaactggagaaaagcgcacaacattctgatgccgacgttcagccagcgggccatgaaggactatcatgagaaaatggtcgatatcgctgttcagctcattcaaaaatgggcaaggctcaacccgaatgaagcagtcgatgtcccgggagatatgacccggctgacgctcgacaccattgggctatgcgggtttaactaccgctttaacagttactacagagaaacgccccacccgtttatcaacagcatggtgcgggcgcttgatgaagcgatgcatcaaatgcagcggcttgatgttcaagataagcttatggtcagaacaaagcggcaattccgctatgatattcaaacgatgttttcgttagtcgacagcattattgcagagcgcagggcgaatggagaccaggatgaaaaagatttgctcgcccgcatgctgaatgtggaagatccggaaactggtgaaaagctcgacgacgaaaatatccgctttcagatcatcacgtttttgattgccggccatgaaacaacgagcggcctgctttcctttgcgacttactttttattgaagcatcctgacaaactgaaaaaggcgtatgaagaggtcgatcgggtgctgacggatgcagcgccgacctataaacaagtgctggagcttacatacatacggatgattttaaatgaatcactgcgcttatggccgacagctccggctttcagcctttatccaaaagaagacacagtcattggcggaaaatttccgatcacgacgaatgacagaatttctgtgctgattccgcagcttcatcgtgatcgagacgcttggggaaaggacgcagaagaattccggccggaacggtttgagcatcaggaccaagtgcctcatcatgcgtacaaaccattcggaaatggacaacgggcctgtatcggcatgcagtttgcccttcatgaagccacacttgtgttaggcatgattctaaaatatttcacattgattgatcatgagaattatgagcttgatatcaaacaaaccttaacacttaagccgggcgattttcacatcagtgttcaaagccgtcatcaggaagccattcatgcagacgtccaggcagctgaaaaagccgcgcctgatgagcaaaaggagaaaacggaagcaaagggtgcatcggtcatcggtcttaacaaccgcccgcttctcgtgctgtacggctcagataccggcaccgcagaaggcgtcgcccgggagcttgctgatactgccagtcttcacggcgtaaggacaaagacagcacctctgaacgaccggattggaaagctgccgaaagagggagcggttgtcattgtgacctcgtcttataatggaaagccgccaagcaatgccggacaattcgtgcagtggcttcaagaaatcaaaccgggtgagcttgagggcgtccattacgcggtatttggctgcggcgaccacaactgggcgagcacgtatcaatacgtgccgagattcattgatgagcagcttgcggagaaaggcgcgactcggttttctgcgcgcggggaaggggatgtgagcggtgattttgaagggcagcttgacgagtggaaaaaaagcatgtgggcggatgccatcaaagcattcggacttgagcttaatgaaaacgctgataaggaacgaagcacgctgagccttcagtttgtcagagggctgggcgagtctccgctcgctagatcgtacgaagcctctcacgcatccattgccgaaaatcgtgaactccagtccgcagacagcgatcgaagcactcgccatatcgaaattgcattgccgccggatgttgaatatcaagagggcgaccatcttggcgtattgccaaaaaacagccaaaccaatgtcagccggattcttcacagattcggtctgaagggaaccgaccaagtgacattgtcggcaagcggccgcagtgcggggcatctgccattgggccgtcctgtcagcctgcatgatcttctcagctacagcgtcgaggtgcaggaagcagccacaagagcgcaaatacgtgaactggcgtcatttacagtgtgtccgccgcataggcgcgaattagaagaactgtcagcagagggtgtttatcaggagcaaatattgaaaaaacgaatttccatgctggatctgcttgaaaagtatgaagcgtgtgacatgccgtttgaacgatttttagagcttttacggccgttaaaaccgagatactattcgatttcaagctctccaagagtgaatccgcggcaagcatcgatcacagtcggtgtcgtgcgcggcccggcgtggagcggccgtggcgaatacaggggtgtggcatcaaatgatttagctgagcgtcaagccggtgatgatgtcgtgatgtttatccgcacaccggaatcccggtttcagcttccgaaagaccctgaaacgccaattattatggtcgggccaggcacgggagtcgcgccatttcgcggtttccttcaagcccgcgatgttttaaagcgggagggcaaaacgctcggtgaggctcatctctattttggatgcaggaacgatcgggattttatttaccgagatgagcttgagcggtttgaaaaagacggaatcgtcactgtccacacagccttttcccgaaaagagggcatgccgaaaacatatgtccagcatctcatggctgaccaagcagatacattaatatcaatccttgaccgcggtggcaggctttatgtatgcggtgatggcagcaaaatggccccggatgtggaggcggcacttcaaaaagcgtatcaggctgtccatggaaccggggaacaagaagcgcaaaactggctgagacatctgcaggataccggtatgtacgctaaggatgtctgggcagggatatagataaagaagactggagacatccagtctttttagtcctttcgaaaaaatggtgatcgcgctaaacattgatgcatacaataacttcagtccgccggaagggcgggctgtctgcaaaacctatttttcgtttttgctagtttatgttattcttatactcggtatctatttcttttttcaaaggcacacatgacaaaagaaatcctttttttatttccgagaaaaaaatgtgaaacgaaatgaaggtttctttcgtccagtgattggtttccaaatggttgtaataaaaatgatatggtgcgaaacataaatattccggcttgccgcggtgtatttattgttgtgtgatgccttgattttgtttggaaagaaggaattggaaggcaggatataaagagcaggtaaatatgaatgaagaacttaaagtgtttaagaaagtagaggttgccatgaagaaacttttttcttacaaacttagcttttttgtgctggctgttatactgttttgggcaaaaacgtatttatcctacaagactgagtttaatcttggggtaaaaggcacaactcaggagatcctcctgatatttaacccattctcaagcgccgtcttctttttaggactggctttgctggcgaaagggcgtaaatcagccattattatgctgattatcgatttcttgatgacatttgtgttatatgcaaatattttattctatcgtttctttgacgatttcttgacgttcccgaacattaaacagtccggaaacgttggaaacatgggagacgggattttcagtatcatggccggtcatgatattttctatttcttagatattatcattttgattgcggtattgatctggagacctgaattaaaagaatacaaaatgaaaaaacgctttgcatctttagtgatcctttctgggatcgcactgtttttcatcaacctgcactatgcggaaaaagaccgtccgcaactgctgacaagaacgtttgaccgcaattatattgtgaaatatttaggtttatacaactacaccatttatgacggtgtacagacggctcaaacagagacgcaaagagcctatgcaagcagcgatgatttaacaagtgtcgagaattacacgacgtctcattatgcgaaaccaaacgccgagtacttcggctctgccaaaggcaaaaatatcattaaaattcacctcgaaagcttccagtcattcctgattgactacaagctaaacggtgaagaggtgacgcctttcttaaataaacttgcgcacggcggggaagatgtgacgtattttgataacttcttccatcagacaggccagggaaaaacatctgatgccgagctgacaatggataactcgatcttcggtcttcctgaaggctccgcgtttgtgacgaaaggcgaaaacacctaccagtcgcttcctgcgattttagaccagaaggaaggctatacaagcgccgtcctgcatggtgattacaaatcgttctggaaccgtgaccagatttacaaacatatcggatatgacaagttcttcgacgcaagcacgtatgatatgtcagatgaaaatgtgattaatatggggcttaaggataagccgttctttacagaatcgattccaaagcttgaatctcttaaacagccattttatgcgcatttgattacattgacaaaccattatccgtttaaccttgatgaaaaagacgcgtctcttaaaaaagcgacaacaggcgataacacagttgacagctacttccagacagcgcgttaccttgacgaagcgcttgagcaattcttcaaggagctgaaggaagccggcctgtatgacaactcagtcatcatgatttacggtgaccataacggtatttctgaaaaccataaccgagcgatgaaagagattcttggaaaagagatcacagattatcaaaacgcacagaaccagcgtgtgccgctgatgatccgcgttcctggcaaaaaaggcggagtgaaccatacgtatggcggcgaaattgacgtcatgccgacacttctgcacttagaaggaattgattctcagaaatatatcaactttggtactgatttattctctaaagaccacgacgatacggtggcattcagaaacggagacttcgtaacgccgaagtacacatcagtcgacaatatcatttacgatacgaagacaggtgaaaaactgaaagcgaatgaagaaacgaagaatctgaaaacaagagtgaaccagcagctgagcctttcagacagtgtcctgtacaaagacttgctgaggttccataaactaaatgatttcaaagccgttgatccgtcagactatcattacggcaaggagaaagaaatcaaataagatgaaaaagagccttgagcgggcgcattgccttcgctcaaggctctttttttggttatacaaccaacttgaaaaaatagattccatttggtcaccaaggctggctttctctcatatcattacagtagattttgaaaccggattgaaatcggacaaattatcggggaaatgccttgatagattgtgaagatgtaccaggtttcgaactcaatattcatagagatgaggggtagagatgaaagcggtcattctctgcggcggaaaaggaacgagaatgagtgaagtcacgaatgacattcctaaaccgctcgccatgataggcggcaaaccgattctatggcatattatgaaaatttatcagtactacggagtaaacgagtttattctgcttttgggctataaaggagaaaaaatcaaggaatactttctcgactatgaatggaagcacaacagcctgacactcgacagctctacgggagaggtacagatgctggggcagcctgaaacgtggaaaattacgtttttggagactggggtagatacgctgacagccggaagaatcttgcaggcgaaagactatatcggtgatgaaacatttctgctcacctatggagacgggctggccaatatcaatcttttccatctcatcagctatcatcagacaaaaggtgctgccgcgactgtcaccggcattgacaaagtctcgcagtttggcaccttgacagttgaggatggcatggcgaaaacattttctgagaagacatcaagtgatggaatcatcaacggcggattcttcgttcttagtccaaaggttttcgattatttgccgaaggacgggaacacgatgttcgaagatgaaccgctgaagaaccttgccaaagatggggagcttgctgtgtaccgccattacggattttggacggccatcgatacgtataaaaatctcttagaagtcaacaaaatgtggaatcaaggacaacaagtatggaaggtatggtgaattgatttgagtttctggaaaaataaaaacgtatttgtcacgggatgcacaggtcttttaggaagctatttggtgaaagagctgatcgaacagggcgcaaacgttacggggctagtcagggatcatgtgcctcaatccaatctttatcagggagaacatatcaagaaaatgaacatcgtgcggggctctcttgaggacttggctgtgattgaacgcgcgcttggcgagtatgagatcgacacagtctttcatcttgctgcacaagcgattgtcggcgtggcaaaccgcaacccgatttctacctttgaagcgaatatcctcggcacctggaatattctcgaagcctgccgcaagcatccgttaattaagcgggtcattgtcgcttcaagtgataaagcttacggcgatcaagaaaaccttccatacgatgaaaacatgccgctgcaaggcaagcacccgtacgacgtctcaaaaagctgcgcagatctgatcagccacacctattttcacacgtacgggcttccggtctgcattacgcgctgcggaaacttatacggcggcggagatttgaacttcaaccgcatcattcctcagacgattcagcttgtgctgaacggggaagcgccggaaatccgaagcgacggcacatttgtacgggactacttctatattgaagacgccgttcaggcttatctgcttcttgcagaaaaaatggaagaaaacaatcttgccggagaggcctttaacttcagcaatgagatccagctgaccgtacttgaactggtagagaaaatattaaagaaaatgaacagtaatctgaaacctaaggtgctgaatcagggaagcaatgaaatcaaacatcaatatttatccgcggaaaaagcaagaaagctgctgaattggacaccggcctacactattgatgagggacttgaaaaaacgattgagtggtatacggaattcttcaaaaagtaatgtgaaacgaggtgaacaagactgtgaccagcgcgtattgcaccgttttatcaaaaggaagattatatcaggcagtcgctttgtttaagtcgttagagcaagttgatcaagacagtcccatttttatactttgcatggatgaagatacgcaccgcgtgttacagaagctgaagatgaagcagctgaaccttgtgccggtggccgctcttgaaaatgaattgctgctgaagctgaaggaaactagagatcaaagtgagtattgctggacgatgaagccgatctttctgcaagctgtgctgaacagcaatcctgagctggagcgtgtgacgtatattgacggggatctctttttctatgcagatccatcgccgatttttgaaaaccagccggactgctcggtgttgctttcacgaggggatattgtaatcccttcttttgagaaagagcagattgacatgctgcagcgtcttttaggcagatataattccgggtttatcagcttcaagcatgatgatgcaggcacggattgcttggagtggtggaaggaacgctgtcttgaggaatgcaaaaatgcaccgggtgaagggaaattcggtgatcagggctatttggattatatgtctgagctgtttccgaatgtgtgtgacattacaacacccggcgtgaacatcggccattggaattatggacagcatacgttttcctggaaagatggccggatcgtgctggaggatggcagtccgctgatcttttatcatttcagcggataccgaatcgtcagcatcaatgaaatcaaacagattcatgaaacaacccgcacagatctgccgtttgtgcatgaactgtatcaagagacactgccgcatatcattcagcacatgcaaacgttagaccctgaatttaacggttttgcttcaaaagatgacaacaaataaatgagtaaatacaggaagtgaaaatgaagtgaaagcaagcgttattattcctgcatataattcgaaggagcgtctttacaacagccttctgtcattaaaccagcaggagtgcgatgaagaatttgaagtcattgtagcggacaatggctctgaggacgggacgctctcgatgcttgagtcatttcaagctgattttccgctgatctttacacggattaaagaaaacaggggcattgcgtacggacgaaatcaggcgcttcgcaatgccagaggagacatcctgattttccatgacagcgatatgcttgcggcaaaggaccttgtggcaaaacatattaaagcccatgagaacgaagagaatctcgtcgtgtgcgggttgttttggaaacggatctacagtttttactatgaacgatttgaagaagaacataaggaacagctcgcaaagctcacaggtgaaatgccgaagaaagacaaacaaaagctgctggaggaagcggacatcaaaaacggaagctttcttgataaaagctttgacctcgataccgactttatagacgtgctcaagaagattttagatgagtacggcgatgacttgaaaggctatcatatgccatggcgcttttttatcacgaataattcctctgtgaaacgcaagcatgtggttgacctcggtttatttgacgaaggcattgtgcggtacgggtttgaggattatgacctcgggatcaggcttcatcaggccggattgaccttcaggcttcgccgtgatattgtcagtgttcatcaggaacatccaagcaattgtaagtctgtagacgatattcgggcaaacattgcctatatgtgcgataaatacaataacatccgctccttagacgttcatctcgcttttaatgggccgttcccgcctgacatgacgaacagaatcatggctgatattcaaaagctgctggaatcacagaaatatgatatgctgctgaatctgtttcttgagcttctgcatgttgttaaagagcgcaacattgatccggattggcgaaagaaatccccaagggtgacggcgaaaagctttgatttgcaaactgtccgcaagcttctgcctaaggcgaagaaaaagctaggcgtgaacgattttgccaacgcactgtatgcgcttgtcaacgatttgctgcacgtggatcttagatcattggatgtggtataagtgagtacatttcatttttcaacgatagtgtcaaggacacatatctttaagctcatgcctatgattcattctctccatgagcattgcgatgattttcatttatatgtgctgtgtgtcgaccagaaagcgtatgaattgcttcagcacgttccatgggagcatgtaacctttgtgcagctgcatgaaatggaagacccggagctgttgaaagcgaaaagcaacagaacgtttcatgaatattgctggacgttaaagcccgcctttttgtttcatgtgatgagcaagtgggatgacgctgaatactttgcccatatggatacggatctatttttcttttctgatccggcacgtatttttgcagaaaacccaacggcgtctctgtatttgactgatcatcgtaattcgccgcgcttcatgtcctactacgaccgaaccggacgctttaatacaggctttgtcggcgccggtaatacaaaggaagcatatgaagcggtgtggcagtggagacaggactgtattgaattttgcacggtcgaaatggatacggaacgaaagacatatggtgatcaaagatatgtggagaaatggccggagcagtttaaaggtgttcatgttgtcaaatccataggagccaatacagcgctttggaatatcgaaaactataaggtcgggcaaaaggacggccgcgtgtatatagatgaaacgccgctgattttctatcatttctctgggtttacgctggtgacagaaaaagagtttaatctttgctggtactaccggattgaagacgaagcgacaattaagatgatttatatgccctatatattaaatctgaaaagatggattgatgaaatacagtcggcgtttccggactttgcggatggctttatcccgaagcacgcagtgcctgacactcattttatccagctggattaaaaaaccccctgccgcctggcaggggttttttcagctatgccattctctcagcttctggtcacttggcaataggaaggcaaggatgccgaggacagggagaaaggcaatggcgatcatcgtcggggtcagtcccgcggcatcaatcagagcgcccagcgccacagcgccgattgcgcccatcccgaaggcaagcccgacggttaaaccggacattgtgccgatttttccaggaactagctcctgtgcgtagacgaccgttacagaaaagctcgacatcagaaccaagccaatcaatgcgagcacgccgtaggcgagaaccgggccggcaaatggcagcacaatcgccagcggcgccgagcataacagcgaaccgaggataacgaagcgttttccaaaacggtctgcaagcgggccgccgagaaacgtgccgatcgcgccgaacagcaagaagacaaaaatatagctttgtgcctgctgaatgcttacgtgataggtatccatcgcgtaaaacgtgtaaaagttaccgatcgcactcgtataccaagaacgagcaaaaatgagaaatataataataataagagcagatacaacagatttggtgatggccgtgttttcagccgttttcttttgcttgcctgatttctgggcaaggctgccgagacgtgaggcgtaccatttcgcaatatacatgagaaacataacagcaagcgcggcgacaagcgtgaaccaaacagcgccgaattgcccgagcggcacaaggatcagcgcggtgatcagcggtgccatcgcctggcctgagtttccgcccacctgataaatcgattgggcgagcccgcgttttgtgccggcggccatatacgccacacgggagccctccggatggaaaatggccgagcctaatccaatgaaaaacacacagcataagatcgttatgaatgacggggcaaatgcaaggcccaaaatgccaagcatgctggcggtcaaaccgactggcagcgcatacggccgcggccgtttatcggtataccagccgacaacaggctgcatgacggatgacaccatgtttaatgtgaaagcaatgatgccgagctgtgtaaacgtcaggctcatggagcgttccaaaatagggaacatggccggaatcacagcctgaagcgaatcgttgagcatatggcaaattccgataataatcaaaatcggatacaccgtggtgcctggtttttgaactgttttttcttttaacggggcggcgatagccattgagtctcctccttacatatataaccaaagcataccaccatattattcataaggtgaagaatttatcaagaggaaaaaagattcttatgaaagaaataccgtcagcctgattagcagctgacggtattttcgatattcaaaatgtgatatagctcttcaagcttacgaatctcataggttggtatgatctctggcacattcggcttcatgtcagggttcatccagcaagtatcaagcccggcgagctgtccgcctttgatatcagcagttagtgaatccccgatgattaatgtgtgctctgctgaaaattgaggaatccgttcaaacacgtaattgaaatattccttcatcggcttttggaagccggtgtcttcagaaacgaaaatgtccttgaagaatggaaataatcctgaatcacggagacgcttatattgtgtgtgagacacgccgtttgtcacgatgtacaaatcaaactgttgctgcagatttgagatgagatcaaatgcaccgtcaataagctgatgtccttcttcaagaaagcggcggtatttttgctcaagcaaagcgccgtccgcttcgtaaccgtactccttgagcaaagcggaaaaacgtgtgtttacgacttcatcccgtgtcatcttaccttcttcaaaggctctccagagaccttgattgatggttttatactgcgccttcatgtcatttgttaaaggaatgttctgatcttcaaacagcaaacgcagggctaaagcttctgccgcttgaaaatcaaggatggtatcatctacatcaaataataaagtgcggtatcgcttcatctgtgtgtctccctttctcatatgtattcaaagtatagcacataaaaaaaggaaaaagccggcgggtgaggcaccgccggctgaaaagagattatttgtttaataagctgtgttttctcgaatataggaagtaaaccagcgttccgacagcgatccagatgacaaatgaaagccatgtgacgccgggaaggctgtacatgaaccaaaggcagatgcctgcgctgataatcggcacaaccggaacgaatggcactctgaaggacgctttgatttcaggatgtttctttcttaacacaatgacagcaatggaaatgaccgtaaacgcggcaagtgttcccatgttcaccagatgggccagcgttccgaggttaataaagccggcgattcccgctgcaacgatccctgtcagccatgtgttgcggaacggggttttaaatgacggatgaacctttgcgaacaatccaggcagaaggccgtctctgctcatggcaaatgtcaagcggacctgtgcgtacagcaaagcgagcatcaccgtcgtaatcccgataatcgcaccgacagaaataattccggcaacagcgtcctgtccgacgaatttcagcgcaaaggatacaggatctccgacattcaatttggcataaggcatcatgcctgtcagcacaagcgataccgcgatgtacagaaccgtacagacggctagagctgaaataatgccgacgggcatgtttttttgcggatttttcacttcctctgatgcgttagaaaccgcgtcaaacccaaggtacgcgaagaatacagtggcagcgctaagtatgacgcctttcatcccgaatggcataaaaggagaccagttatccggtttcacatagccgatgccgacaataatgaacaataatatgatcgcgattttcatcagtacgatgacgttgttaaagcgtgtgctttccttgacgcctctgctgacaatcgcagtgatgaggagaatgatcaccgcagccggaaggttaaatacggcgcccgccatgcttcccggcgctcctgtcagtgcagccggaatatgaagattgaagccggcaagcagtgattgaaagtatgaagaccagccggtggcaaccgccgacagtgcaatgacatattcaagcatgagatcccatccgatcaaaaaggcgagcagctctccaagtgtcacgtatgagtatgagtacacgcttcccgaaatcggaatggaagacgaaaactcagcataacagaaagcagccagcgcacaggcgagccccgctaaaataaacgatatgatgagggcgggacctgcaccggtcgctgccactgttcctgtaatgacaaaaatccctgtaccgatgacacaaccgataccgagcaaggttaaatcaaatgcgcttaacgtacgggcaaggctttttgacttgctctgcgcactcaatgtttcaagcggtttttttctaaataatgaactcatcaaaagttcctcctagaaatattcaaaatattctaatcattatatgcagttcttgttgtattatattgtcgaaatttgacgtagtcaataaaatatttttctgctttaaatgatagaagcgaaacagcgttgtcgtatcataggatagtaatttttactaatcgtatattcaattttatgcaagatgaaccgatagaaaaaatagattcgcccatattttgatttgcggttataaaggagatgctgaccatgtttcaatatgaagagttgaataaacagtttatcggcgggaaatggcaggagggcagcagcccaaatgtattggaaaacaaaaatccttatactcaaaaaacattcacaacattccgtaaagcgactgctgacgatgtagatgaagcgtatcgggcagcggcgctggcaaagaaaaaatgggatgcggtcaacccgttcgagaaaagaaccattttagaaaaagccgtcacgtatattgaagaaaatgaagaagccattatttatttgattatggaggagctaggcggtacaaggctcaaagcagcttttgaaatcggtcttgtcaaaaacatcataaaagaagcggcaacgttcccaatccgcatggaggggaaaattcttccgtcaacaatagatggcaaggaaaacagattatatcgcgtgccggcaggcgttgtcggtgtcatcagtccgtttaacttcccattctttttatctatgaaatcagtggcgcctgcactcggagccggcaatggcgttgtgctaaagccgcatgaggaaacgccgatttgcggcggaacgctgattgcgaaaatttttgagaacgcgggaattccagcggggctgctgaatgttgttgtcacagacattgctgaaatcggcgacagcttcgttgagcatccagtgccgcggatcatctcatttaccggttctacgaaagtcggcagctacatcggacagcttgcgatgaagcattttaaaaagccgcttcttgagcttggcgggaacagcgccttcatcgtacttgaggatgcagatatagaatatgcggtcaatgcggcggtgttcagccgatttacacatcaagggcagatttgcatgtcagccaaccgcgtgcttgttcattcttctatttatgacaagttccttgagctgtaccaggcaaaagtggaatcgctgaaagtcggcgacccaatggaccctgatacgattatcgggccattaatcaacagcagacagacggacgggctgatgaagactgtagagcaagcaattgaagaaggcgctgtaccagtgaagcttggcggatttaacgggacgatcgtggaaccgacgatcttaaaagacgtcaaaccgttcatgagcattgccaaggaagagctgttcggaccagtcgtctcctttatgaagtttgattcagaagacgaagcggtggatatcgcaaacgaaaccccgtttggcttgagcggtgccgtacatacgtcaaatcttgagcgcggcgtggcttttgcgaaacgcattgaaacaggcatgattcacgtcaatgacacgaccatcaatgatgaaccgaatgtagccttcggcggtgaaaagcaatcaggcctcggccgtttaaacggtgagtggagcctcgaagaatttacaacgctgaaatggatctcggtccagcacgaaaaacgcagcttcccttattaatgaaaaggagtgaatggaattgaccataaatacggaaaaagaaaccgcagatattctggacgcatttatcaaagtagccccttatttaaacagcctggttcaggatgatattacaatcggcatttatgatacggaaaaactgctcgtgaatataccggccaaaaccttttcgctgaacgtaaaagccggcgatccgctgcaggaaggggatatcatcacagatgccatccgcagcaatcagaagaagacgagcatggttccgaaagaattgttcggcttcccattgatcgcgcgtgccatcccgctgcacgacgagaatggaagagtcattggaggcgtcggcctcggaacgagccttgaggagtcgtcaaagctgcatgatgtcgcggaaagcttatcagctgttgttgaacaaacagccgcggctatttccgacatttctgaatcaattaacgggttttcaactcaaatgtcgggcatttcctctcaggcgaaaaaagtaagcgaaagcgccggtgaaatcgccgatatttcagtaactgttaaaggcatctcggaccaaagcaatctgctcggcttgaacgccgcgatcgaagcggcaagagcaggggagtccggaaaaggattctctgtcgtcgcagatgagatcagaaagctagcgacgcattcaaaagaaaatgtcggccaaattgaccagattacgaaaaaaatccacagcctgctgaaagggctggaggaatccattgagtcgattaaccagcatacagacggacaagccgctgctgttgaacaaatttccgccacgatgcaggagatttcaggaagcgcgcagcatcttgcgaaaatggccgaaaaagcgcttgaggaagagtaagagaccggggacaaacatccccggtctttttcttatcctgcatttccatgaaattcgtctgacgttttactagttttattccagcggctgatttaaaatgtacacatgaacttacgtgaggattgataggaaccatgagcatattaaaagcggaaaatctttataaaacatacggagataaaacattatttgaccatatctcctttcatattgaagagaatgagagaatcggattaatcgggccgaacggaacaggaaaatcaacgctgttgaaagtgattgccggcttggaatctatcgaagaaggagaaatcacgaaatccggaagcgtgcaggtcgaatttcttcatcaagacccggagctgcctgcggggcaaacagtgctggagcatatctattccggtgaatcggctgtgatgaaaaccttgcgtgaatatgaaaaagcgctgtatgaactggggaaagatcccgaaaatgaacagcgccagaaacacctgctggcagcacaagcgaaaatggacgcgaacaatgcatgggatgcaaacaccttggcaaaaaccgtattgtctaagctgggcgtcaacgacgtaacaaaaccggtcaatgagctctcaggcggccagaaaaaacgggtggccattgccaaaaacttaattcagcccgctgatttgctcattttggacgagccgacaaaccatttggataatgaaacgattgagtggcttgaagggtatttaagccaatatcccggcgccgtcatgctggtgacgcacgatagatatttcttaaaccgtgtcaccaaccgcatttatgagcttgaaagaggcagcctctacacttacaaaggcaactatgaagtgtttttagaaaaacgcgcggaacgggaagcgcaggctgagcaaaaggaaacgaagcggcaaaacctgctgcgccgcgaactggcttggctcagacgaggagcgaaagcccgctccacaaaacaaaaagcgagaattgaccgggtagagacgcttaaagagcagacaggccctcagtcatcaggttcactcgattttgccattggctcgcaccgtctcggaaaacaggttattgaagcggagaacgtcatgatcgcttatgacggccgcatgctcgtcgaccgttttaatgaacttgtcataccaggtgaacggatcgggatcatcgggccgaacggcatcgggaaaacaacgctgttaaatgcccttgccggccgtcatacgccggacggaggcgatattacgatcggacagacggtcagaatcggctactatactcaggatcatagtgaaatgaacggtgagttaaaagtcattgactatataaaagaaacggcggaggtcgtaaaaacggcagatggcgatatgattacagctgaacaaatgctcgagcgtttcctcttcccgcgttcgatgcagcagacgtatatccgcaagctgtccggcggggaaaaacgccgtttatacttgcttcaggttctcatgcaggagccgaatgtcctgtttctcgatgagccgacgaacgatttggatactgaaacattaagcgttcttgaggattatattgaccagttcccaggcgtcgtcatcaccgtatcccatgaccgctatttccttgaccgcgtcgtcgaccgtttgattgtatttgaaggaaatggtgtcatttcccgctttcaaggctcctatagcgactatatggaggagtcaaaagcgaaaaaagcggccccaaaaccggcagctgaggaaaaaacggctgaagccgagccgaagaaaaaacggaaaaagctttcttacaaagaccagttggaatgggacggcatcgaagataaaattgcccagctggaagaaaagcatgaacagcttgaagctgacatcgccgcagcaggcagtgattttggcaaaatccaagagctgatggccgagcaggcgaaaacggcggaagagcttgaggctgcgatggaccgctggacagaattgtccctcatgatcgaagaactggaaagctaaaaagcgtggccgcagcaggccgcgctttttttcacataatggacaaaaacgaaccggcctgcttatgttaggataaagttgtgtgtcagcggcacatggaaaactaacggagatgatgaagtatgacatgggcgatcgtgatgttaattctcatgagtctggtgaaaatcgtattaacctgtcttcctacaggcgtcatagaatggctgctcggcaaatttgaagtgcacgccaagctgagtgacgaaaatgcgagtctctctctagatggaaaacgcctcgagggtgcagagaagcagaaagtgattgatcaatttaacgaagctatcttcctggaaaaatattatatctatccaggtgatgaagagcgttatttacatccggaaaacggcggcacgcctctggtgatagatacaaaaaaaggaaaaaaagacgtgaagctgttcgtgtaccgctacgacgaccatatcgacgtcgtgaaacagtacaagaagaaagtgatcgcgtatcgagtgctttctgaaagccttcaaaaagagtctctgtcagtggcgggaagtttagcttaaacaggaaagtgaaagacgggtgctgtatgctgctcgtcttttttattgttttttaaaacttaacgtttacgttaaggttcaaaaggtgtataatggtaacagaaacggcgaagggggatttaccttggaatggatgaagattgatcaagtggccaaaagaagcgggctgacaaagcggaccatccggttttatgaagaaatcggcttgattccggcgccgaaacggacagacggcggtgtaaggctttattcagaggatgatatggaggagcttgagaaagtcatcagcacaaaagaggtgctcggtttttcccttcaggagcttcagcatttcatggaaaccagccgccagctagagttaaacaaagaggggtatttgttgtcactggatcctaaggaacggaaagaaaaactggaggaaattcaggaaaccctgaatcaccagctggatttgattgatgagaaaatccgcacattccaaagctttaaagaacgcctgcagggcatgaaaggcaaagcggaacgcgccattcaatcaatcgaatgaaaagtttgttaaacgctatttttgtagcgtttcttttaatggaataaagatggaggttaggtcaaatggataagacaacacaagtgaatcagaaaacgggtttgctcagccagccaaaagcggtatgggctgtcgcgtttgcctgtgtgatttcttttatgggaatcgggctggtcgatccaattcttccggccattgccgcacaattgcatgcttcacctagtgaagtatcactcttgtttacaagttatttgcttgtaaccggatttatgatgtttttctcaggagccatttccagccgcatcggcgcgaaatggacattaattctcggacttatttttattattgtgtttgcggggcttggcggcagctcaagctcaatcgctcagttagtcggctatcgcggcggctggggattagggaatgctttgtttatttcaacagcgcttgcggtcatcgttggcgtgtcagtcggcggcagcgcccaagcgattattttgtatgaggccgcgctcggtctcgggatttctgtcgggccgcttgcaggcggagagctcggaagcatttcatggcgcgcaccgttttttggagtatctgtcctgatgtttattgcgttaatcgcgatttctttcatgcttccgaagctgccgaaaccggcgaaacgcgtcggtgtgtttgatgcgatgaaggcactcaaatataaaggcctgctgacaatggcggtatcggcattcctatacaactttggattttttattttgctagcttattctccgttcgtactggatttagatgaacacggtcttggatatgtcttcttcggctggggccttctgctggcgattacgtcagtctttacggcgccgctcgtgcacaaagcgctgggcacagtgcgttcgctagtcgttctctttatcgcctttgcggccattctcgttattatggggatctggacagaccatcagactttgattattacatgtatcgttgtcgctggtgctgtcctcggtatggtgaatacgatcatgacaaccgctgtgatgggttctgcgccggttgaacgttcaatcgcgtcttcagcctacagctcagtccgcttcatcggcggcgcgctcgccccgtggattgcaggaatgctgtcagaacactttactgcaagcacaccatatacagtaggcggaatcgtcgtttttgtcggcatgcttgtccttctcatgggacgtaaacatcttgctggaattaaggcggggcattaataacgaaagacactgcgcatatgcagtgtctttttattcgttataatgcatcataatcgaattggtgcaggaaaggacaacctttatgacacaattttactattttccggctgaaaactccctttagaaaccggttttttcggtcagcaagaacggcgttcgcggaaagggcatccgcttcggtcaggcattgatgcggctgggatttatcttgcagaagctgagaatgtgtccgttcatttacgattgccatttcagtgatggttcatgctgtagaggggacgtttgccatggataaggcaaaacctgacgaatatgatcagaaatgtttagaaacgctctatcaatacatacacagcgtcatgaaaaacagcttttctcggtcgagtggtttaccgcttgggaagatgaggaggattttgagctgtctgccaaaagagagctgacacttgatgaattcacatctccattgcagctcattttaaaagacagagagcttttgagaatcgttcagaaaaaatggcagtaaaaaacccgccctttagcaggcgggtttttttataaattaaagcactttcgtcgtccaagactcgcagttccacgtttctgtcgcaatatccatataaaagtctggctcgtgggaaatgagcagaatggagcctttatattctttcagggcgcgcttgagctcttccttggcatcggcatccaagtggtttgtcggctcatcgagcaccagcaggtttgtttctgagttgattagcttgcacaatctgactttcgctttttcgcctccgcttaatacggagacgcggctttcgatatgctttgtcgtcagcccgcattttgccagagcggcacggatttcatactgcgtataagaagggaattcgctccatacttcttcgatgcacgtattgttgtttgtttccttgacctcttgctcgaaatagccggtatagatgtgctcaccgcgttcaacagagccttcgagcggctggatttcaccaagcaaacttttcagcaatgtcgtttttccgatcccattcgcgccgtaaagggcgattttttggccgcgctccatgcggaggttgagcggacgggacagcggggaatcgtaaccgatcacgagatccttcgtttcaaaaatcagcttgcctgacgttctcgccggcttaaagtggaattccggctttggcttttctgccgcaagctcgatcatatccatcttatcgagtttcttttggcgggacatcgccatgtttctcgtgctgacacgcgctttgttgcgggcgacgaaatccttcagctccgcgacttcctgctgctgctttttgtaggccgcttcaagctgctgttttttcacctcgtagacttccataaactgatggtagtcgccgacataacgtgtcagctcttgattttcaacgtgataaatcaggttgatgacactattcaagaacggaatatcgtgggaaatcaggatgaacgcgttctcgtattcctgcaggtagcgtttcagccattcaatatgctgttcatcaagatagttggtcggctcatcgagaagcagaatttccggcttttcaaggagaagcttagcgagaaggacctttgtgcgctgtccgccgctcaaatcggtgacatctcgctctaaaccgatatcgctcaaaccgagaccgcgggcgatttcttccaccttggaatcaatgacataaaaatcattgtttgtcagcgcgtcttgaatgacgccgacttcttcaagcagcttctcgagctcgtcgggatcagcctcgcccattttgttgtaaatctcgttcatttcctcttccatcgcaaataaataatggaatgcgtctttcaggacgtcgcgaatggattttcctttttccagcacggtatgctgatcaaggtatccgacacggacattttttgaccattcgacttttccctcatcaggttcaagctttccggtaataatattcatgaaggttgattttccttcaccgtttgcgccgatcaagccgacgtgctcgccttttaacaggcggaaggaaacgttattaaaaatggcccggtccccgaaaccgtggcttaaatcctttacagataaaatactcatgtttacacctctatcgttatcaaacacgcacaatcggcgtgtaatattcacccttttgattataaaggaggattcggaatgttgaaaggtataggaaagaaaaagaaaaattgcgttccgggcgaggttttgagatactatggaatagatttcaggaattgaggagaacaaaatgacgcaaacttggccatttttacataatgcacaatcatttatacaagagaattggaatgcttccggctttcaaaagccaacccctgttcaggagcaggcagcccagctgatcatggacggaaaggatgtcattgcagaatcgccgacaggcacagggaagacgctggcgtatgcgctgccggtcttggagcggatcaaaccagagcaaaagcatccgcaggcggtgattttagcgccttcccgtgagctggtcatgcagatttttcaggtgattcaggattggaaagcgggctcagagctgcgcgcggcttccttaatcggcggggcgaatgtgaagaaacaggtcgaaaagctgaagaaacatccgcatatcatcgtcggcacgccaggcagggtgtttgaactgattaaagcgaagaaactcaaaatgcatgaagtgaaaacgatcgtgcttgatgaaacggatcagctcgtcctgccggagcatcgcgaaacgatgaagcaaatcattaaaacaacattaagagaccgccagcttctatgtttttctgccacgctcaaaaaggaaacagaggacgtgctccgcgaattggcgcaagagcctgaggtgttgaaggtgcagcgaagcaaggcggaggcagggaaagtgaagcatcaatacctgatttgcgaccagcgcgacaaagtgaagctgctgcaaaagctgtcaaggcttgaaggcatgcaggcactcgtatttgtgagagacattggcaacctgagtgtatatgcggaaaaactggcatatcaccacgttgaactcggcgttttgcacagtgaagcgaaaaaaatggagcgagcgaaaatcattgccacattcgaagacggagagtttcctcttttattggcgactgacattgccgcacgcggtttagatattgaaaacctgccatacgtgattcatgctgatattccagatgaagatggctatgtccacagatcaggacgaacaggccgggccggaaaagaaggcaacgtgctgagccttgtgacaaaattggaggaatctaagctgaaaaaaatggcgaagaagcttggtgttgagctgagtgaagctgtgtatgcaggcggaaaactgaagacgaaataaaaagaagggcgaagagccctttttttgttgtaaaataatagaaaagattttgcgcggaggtgggaaaatggcttcaatagacaggtttcaagtaatgcaggagccagagctgaaaatccttgaacactggtttgagaatgaggataccagacggagaatggatgggatgctgctattagatgagtggtatgcacgagtaaataaagataaacacgatactgtcatcatggcgtatgatggacagctgccggcagggatggtcgttattgagttcggagaggagcggacatatattggattgatcgtcaatcctttgtaccggcttaaagggtatggaaaacagatactgcaaaagctgatgaccgaacctgattttactagcgtgcgagaatgggtggcatgcattgaagaagacaatcgaatcagtttagcttgctttcaagcagcaggattcactttagaagacacggaacctgatgaagatggttttcttacgctgattcttcgcaactgatctcatcgaaacacaaaaggagggcaaaaagccctcccgttttcatcttcattcagctcggatcactgaccttgatcagctgtttccctttattttctcccttaaataaaccgagaaacgcgtcaggaatgttttcgaagccttctgtgatggtttcctcgtaatggagtttaccagccttcagccattctgccagctgttttgctccctcagaaaaacgatcggagtagtcgcttacgataaagccttgcatcagcgacttcgttttaatgagttttgattggacacgagggcccatgtcatctgcttcgctttctgcgttataggaagaaatggcgccgcacaccggaatgcgggcaaattcattgagcagattcatcaccgcgtctgaaatcggtccgccgacattgtcaaaatacacatcgacaccgtcaggacaagcgttttgaagcgctttttggatatcatccgctgttttgtaattgatggcttcgtcaaactgaagctcctgttttaaatagtcgattttttcatcagagcccgcgatgccgacgactcgcgcgcctttgattttggcaatttgcccgactgttgaaccgacggctccggcagctcctgagacaaccacggtttcgccttccttcgggcgtccgatgtccagcaatccgaagtatgctgttaagccggtcattcccaaaatgccgagataggccgaagcgggagcaaggcttgtatcaatttttcgcaaggcagactcgctcacagcggaaaattcctgccagctgagatttccgatgacgatatcgccttttttcagatgattcccgtctgacacaacttcagcgataacccctccagaaagcgctttatccaaggcgaacggctcaacatatgacttcgtatcctgcatacggccgcgcatataagggtcaaccgatacataaagcgttttgacaagcacttccccttgcttgggttcaggaaccggaatggtttcaaagcgaaagtcttcatgaacaggaataccttgtggacgtcttgctaattgaatttgctgctgagatgctgtcattttcatcctcctatcacttggttgacaccactgtaacatggacaggagaggaaatacaaaaggtaagctggcatacaaaaaaggttatagatgagcttatgctttctacaagctcttttgttttaaaagttctctttagtcatttatcattattagaaaacagaacagaaaaagagctcctgtacacctagctaagattggctagtgtgtatgtcgattctttttcatattcttgcaagcatctgcgagggggagcttagtcgttcacattttgctttcgcatcaatctgcaatagcaaagtctatgcgatttttttacatcagcaaagatttgttcaattttttccttttatgccgagtttttctgaaacagataattgatggtactcaaccattttcttttggtcaataaagtaatgtttacttattaattaaacacgcgaaaaagcaaacgaaaacataattaaattttatatatttattaaaagcttatatgtttatttaccttttttttgaattgtaattgagaaaatccatatattgcggacactaataaaagaatacctgctgaaacataaactaaacgaactccaaggaaatctgaaatagcccctatagccagaattgaaaacataaaaatgaactgtactaaagaagaccttgcagacattatattaattcgagtttgctcggttgttatgttctgaataagtgtttcttgtgtaagatctcttaatatataagccggccccataaagagaaccaaaattagagctaagtatgaattacttataaaaccatatattaaagttaaacttccatatgagacagcgccaattaacataaaattaattaacttattttgaaatctctccgacagcttatatattataaatccccctatcatcgaacctaaataatatgctccattaataaatccccaccatgattctcctttatgcaagacttcgttaacgaaagctaaagagacagatcctatccaaatcattcctgcccatgactcaattaaatccataataataattgttctaagtttcttttggctaaataaataccgccaaccacttactatactcttattgggagaatttttttcacgtatgacagaattagcgtggccatgtggtagacaaaataaaagagaaagaagagatgtaaacaacaaaaagatagtaagtataatggtatatccctcacctaaaaatgcaattatgagaccacctaaagaccagcctacaaattgaaaagtttggtccactgtagataataatccatttgcttttactcttctatcaggagagattatttcccctataattgcactttttaaaggtgagaaccatccattaaaaaaggaaatacagctaataataataaagactaaaatgagagtttgattagagtaagttcttaataaagcatagaacaaacatattaataacagcatttgtatcaattgagaaataattattgtaagaggcagttttaatcgaattgttattaacggtaatatagcacttccaaaaatacgaaaaataatacttattaatgtcaccatagaggcgatggttgtcgaattggtcattttaaacaaaaacgaaatcactaccatagtatatagagaaaaacctaaatttgtagtggtctggctaaataaaatagaataataacctttactcatatgtatcctcccttggaataatttttctcggtaaagagcttaaacatatttaaacaccttaaaacaacaaaagtaaagaaaaaatttccttgtaaactatttacttttattctatttattgttattgtttatttaagttctctgactattctatcaatattcagggaaccacatatcttattaaaggggggaaaaccatgagaaaattaagaaaaaactggagaaaatcgattgttagcccggttctttatactaatgaaaaatggtaaacacttagggaatagcatttaatgctattccttatttcaacaaacaaatcgggaggttatcgtaatttgactctattaatgcaagatcataaatcaatttacaataaagatatagaaatattaattgaagttgaagaacttattacttctgttccagaaaataaaaaaaatgattttaagagtttaatcgataatagaattatgactctactaaataaaattcaacaccctgtagcagcggaaaatgtgtttgggatgtgtattgcttatccgaatacttacataaggtatagattaattgatttcgttgaaaaatgggtaccttatttctctgctgtagaaactataatcaatctaacccaggatccggatgatttagtttcttttaaagctatggatgtctgtgcaaatcataaaattgaagaatctgtagcatatttgtcttcgattattgatgatgtccgggagagtataagctaccctaaaaaacctgtgggattaggggcccaaaaagtattaagtacattattagatatattcggtgttgaaaaacatgaagagctagtaatgctaaaaaattattttgatcaaaatggtatacttcctaataactttgactttgaagaaaaaattcctcaaagtctaatagaggaattcgaaaaaacagaagaagatgggatgattttaattccgggtggcttttttgaattcggtttaaatgaaaatgaaattcctgacaaaacatttaattggaaagatgctgttcctagacaaaaagtatggttacctccattttttatcgataagtatcctgttacaaataaagattatgatatctttaccgagttcatagaggaaaatgggcatatattctgtcatcctaatgaaccgcagaataaacaacatagaagaaatacatattgggatgataggtatttagataatcatcccgttacaggtatagatttttatgatgcatttgcttacgcaagatataaggggaaagaattgccaaccgagtttcaatgggaaaaagctgctcgaggcgaaaagggtaatgtctggccttggggagataaatttgatcctgcaaaggttcaatatgctggaagtctttataatgaacccattacttctttaaagtcctggagagaaaatttattaaaagctcatgctgataaagaattaaatcatttaacaagtgatatttttgaacaaaatggtgaaagtccctatggagtatgcggtatgatcggcggaacatgggagtggactagaagtgagcttaaaacaaagagagctttccaccctatttttgagaatgtaccatttaatagtgttaactcatttgccgttcttaaaggaggatcattcttctctcatccaggcttaatgttcccttcttttagagcaaaagatattcctttctgtcgacacaatgaaatggggattagatgcgtaaagaatattccagtatataaaattagagaatcaattaatgggccaattactaataaagcaatttattaatcattctaggttagagacttgataaaagtatactaacattgtgtagtaatgttcagcttgtagaaaaaacaatgttttttctacaagattttattttaaatgcttttcaaaattatcagggattgagaatcagaaaaagagccattaagctcgatcttagctaggtattacgatcttctgtatattattgtgagaaatatagaagattcagttagttagcatttcgattttaagctgagcctgcaatagcaaagcatctgttttgattattctttttctgatacataagctaattttgtcgcttttcttttttgtcttttcacgcatttcgaggatgacttactataattctttcagcttttctatgtgttaagattcgaatagatgaaataactttaacaagttggtcaataagaacagatttaactttatgttaaaagagtatctcgtatagaacataagaagaatgacgagttttttaagattatcatcaattatgtgagaataaaatattataagggaaaatgaaggctgtcacgtttctcgacagccctagggaattcctctccttttcatttcgcccgtaatttcgggcacagtcccgtcggcaggcacattggcttctggtcgatcgggcttctcatgatgcagcattccaagccgaagacttcacggaaaaatggctgggtgaacacatcttccggtgttccggcgttgtatatttttccgtccagcacactgatcagatagtcagcatattgagcggcttggtttaaatcatggagcaccatgacaacggtgcggccatggtcgcggttcagctttttcagcagttcaagcacttcaatctgatgtgagatgtctaaatacgtggtcggctcatcaagcaaaagcaaatcagtgccttgcgcaagtgccatggaaatccaggctctttgtctttggccgcctgagagggcatcaagtgtccgatccttcagttcaatcatgcccgttgcttccagcgcccactctaccatgtcatgatcctcttgggtatgcttggataacagctttttgtgaggatgtctgccaaaatagcataattcctctaccgtcaatccttcaggagcctgaggagattgtggaagaatggccagtttttttgcgacttcttttgatggctggcggtggatgtcttttccttctagtagcactgtaccgctttttggggccatcagcctggcgagcgatttgaggattgttgatttaccgcagccattagcgccgatgagcgcagtgatttttccttcttctatctttaagtcgactccgtcaataatcactgtactgtcatatgaaagagtgagctggtctgcagccagttttcccatggtatcctctccctactgtttcctcgcttcgaatttcaataaatataagaaataaggcgcgccgatcacggctgtcagtattccggcaggtatttcaaccggaggcatgatgccgcgccctaacgtatctgcaattaataatataatagcaccaatcaatgccgatgcaggcagtaaatatttagctttttctccggtaagccgtctggcgatatgcggagcaagcaagccgataaaaccgattgagccgacgacggctacacagcttcccgccagcgccaccgcggtgaaaatcaggatgaatctcagccggtttgcgttttctccgagaccctgtgcaagctcatccccgagtgacataagatccagcttcggtatgagtatgcagacgatcggaaaaagaatcaaaagccatggcgcaagcagcttgacttcttcccagtttcttccccagaggcttcctgtcagccaaatgagtgcagcattcacgtcgcctggaaacttgaccatcatatattgcattccggcgtggcagaccgcgcctaaagcaatgcctgataaagccagtgaagagggctgaatgctcttttttcgggctatcattaataatagtacagcaataatggcggctccggcaaatgcggagaacggaagcacgtataccggcgactcaggaaagatgagaatcacagccatcgccgcaagtccggagccttttgaaatgccgacaacgtccggggaagcgagcggatttcggatcacaccctgtaaaatcgctccggcagcggcaagtccagcacctgccaaaatcgctaatataatgcggggaaggcgatattgctggatgataaattcaaaggaatgatccagtcccagcagattcgtcactaccgcatcaggtgaaatgtataatgcaccgattccaatgctgatgacggacagaacgattaaaatcacggccaatatgagtatcgccagtaaggggcgtttttgttttctggttgttttcttcatttcaggtttcgccctttccttgccaaatataagaaaaacggcgttccgataatcgcggtgacaatgccgaccggtgattcataaggaaatgcaatccatctggccagaacatctgcgtacaccagcaaaatggcaccgaacagtgccgaaaacggaagcacgtattgataatgttctccgatcagcttgcggacaatatgcgggacgagcagcccgacaaagccaatcggcccggcgacggctacggaagcgccggaaagaattaaaataatcaaactgatcagaatcctgatgccgttcatattttgtccaagcccttttgctgtttcgtctccgagaccgagaacagaaacagaaccggaaaatacgagggcaagcccgatgccaatgacagaaaaaggagcgatggttatgacgtcctgccagttgctgccgtcgattgcgcctgtcatccagtacagaacatcctcacctgactcatttaaaataatgatggcctgtgtcatagaggagaggaacaagtgcacggccattcctgacagcgccagcttgacaggcgtcattccgccggatgaggcaatcatatacacaatcgcgccgcctgctgccgcacccgcaaaagcgaatataacagatgaatagggcgatgccggcagaatgacgagagaagcaacaacaaaaagcgatgcacccgcattcacaccgaaaatttggggtgaagccagaggatttctggtcatagcctgcatcagcgcccctgctacagctaggctggcgccgacaaaaacgccgattaatgtgcggggaaggcgaagagtagagatgatgagctgttcctttgaaccgtcccatacaaaaagatatttcaatgaatctatgatgctgatgtctgaggctcctactgaaagattcagcccaagcccaaatataaaaataatcagtgcaatgataaacatcatcagtcttgatgatgagcgccgtttggctgaatgatacaacagtctcacttccttactgcgtctggttgcaaaaacgaagaagcaaggattcccctcgcttctcatttgtcctatttattatacacttttttaagcacatctttggcgcttgtttcactagacttgatgcctctgaatcttgtccaagtgtcacggtccgcatcatagacttgtccatttttcaccgctttgagatttttccagagcgggttcgttttccactcatctacaatggttttgccttcgttggctgagatgaacaaaatatcaggatcgattttgctcaattgctcaaggctgacctcttgataggcgttatctgacttcacagcgtgtgtaaagcctagcattttaaagatttctccgtcataggatgatgatgtatgaagctggaaggaatccgctcttgcaacgccgagaacgatgttgcggttttcatctttcggaagttcggcttttagatcgttgatgacttttttgtgctcggcaagcttttcttttccttcatcttctttatttaatgctttagcaatggtcgtaaagctgtcgatcgtttcgtcatatgtcgcttcacggctttttaattcaatcgtcggggcgatttttttcagctgtttataaatgtttttatggcgctcagcgtcagcgatgattaaatcaggcttcaaggaactgatgacctcaagattgggttcgctgcgtgtgcctacagatgtgtaatcaatggagctgccgacaagctttttaatcatatcttttttgttgtcatctgcgatgcccaccggcgtaatgccgagattgtgaacggcatccaagaatgaaagctcaagcacaaccacccgcttaggtgtgccgcttactgtcgtttttccttcttcgtcatggatcactctggaatccttagactcgcttttgccgcttccgttgttattctggcttgatgaacagccggatacaatgaggcaggcgagcaataaaacactcatgatggcaatcaacttgttagaataggtgcgcatgtcattcttccttttttcagatttagtaatgagaatcattatcacatgtaacactataatagcatggcttatcatgtcaatatttttttagtaaagaaagctgcgtttttactgctttctcatgaaagcatcatcagacacaaataagtggtatgcagcgttaccgtgtcttcgagacaaaaacgcatgggcgttggctttagaggtttcgaacatatcagcagtgacataaggaaggagagtgctgagataaccggacaatttcttttctatttcatctgttagtgcaaattcaatgtcgccgatattcatgataatcgagaaaacaaagtcgatatcgatatgaaaatgttcctcggcaaaaaccgcaagctcgtgaattcctggtgaacatccggcacgcttatggaaaatctgtttgactaaatcactcacaatccaagcattgtattgctgttctggtgaaaagtattgcattagacatacctcctgctcgtacggataaaggcagcgtttcatggtcgtgtgctccgtgcagcggcttctccttaattttgatttttctgaaaataggtcccgttcctatcactttaccatggacggaaaacaaatagctactaccattcctcctgtttttctcttcaatgttctggaatctgtttcaggtacagacgatcgggtatgaaagaaatatagaaaacatgaaggaggaatatcgacatgaaaccagttgtaaaagagtatacaaatgacgaacagctcatgaaagatgtagaggaattgcagaaaatgggtgttgcgaaagaggatgtatacgtcttagctcacgacgatgacagaacggaacgcctggctgacaacacgaacgccaacacgatcggagccaaagaaacaggtttcaagcacgcggtgggaaatatcttcaataaaaaaggagacgagctccgcaataaaattcacgaaatcggtttttctgaagatgaagccgctcaatttgaaaaacgcttagatgaaggaaaagtgcttctctttgtgacagataacgaaaaagtgaaagcttgggcataaagcaaggaaaaaaccaaaaggccaatgtcggccttttggtttttttgcggtctttgcggtgggattttgcagaatgccgcaataggatagcggaacattttcggttctgaatgtccctcaatttgctattatatttttgtgataaattggaataaaatctcacaaaatagaaaatgggggtacatagtggatgaaaaaagtgatgttagctacggctttgtttttaggattgactccagctggcgcgaacgcagctgatttaggccaccagacgttgggatccaatgatggctggggcgcgtactcgaccggcacgacaggcggatcaaaagcatcctcctcaaatgtgtataccgtcagcaacagaaaccagcttgtctcggcattagggaaggaaacgaacacaacgccaaaaatcatttatatcaagggaacgattgacatgaacgtggatgacaatctgaagccgcttggcctaaatgactataaagatccggagtatgatttggacaaatatttgaaagcctatgatcctagcacatggggcaaaaaagagccgtcgggaacacaagaagaagcgagagcacgctctcagaaaaaccaaaaagcacgggtcatggtggatatccctgcaaacacgacgatcgtcggttcagggactaacgctaaagtcgtgggaggaaacttccaaatcaagagtgataacgtcattattcgcaacattgaattccaggatgcctatgactattttccgcaatgggatccgactgacggaagctcagggaactggaactcacaatacgacaacatcacgataaacggcggcacacacatctggattgatcactgtacatttaatgacggttcgcgtccggacagcacatcaccgaaatattatggaagaaaatatcagcaccatgacggccaaacggatgcttccaacggtgctaactatatcacgatgtcctacaactattatcacgatcatgataaaagctccattttcggatcaagtgacagcaaaacctccgatgacggcaaattaaaaattacgctgcatcataaccgctataaaaatattgtccagcgcgcgccgagagtccgcttcgggcaagtgcacgtatacaacaactattatgaaggaagcacaagctcttcaagttatccttttagctatgcatggggaatcggaaagtcatctaaaatctatgcccaaaacaatgtcattgacgtaccgggactgtcagctgctaaaacgatcagcgtattcagcgggggaacggctttatatgactccggcacgttgctgaacggcacacagatcaacgcatcggctgcaaacgggctgagctcttctgtcggctggacgccgtctctgcatggatcgattgatgcttctgctaatgtgaaatcaaatgttataaatcaagcgggtgcgggtaaattaaattaagaaagtgaaaaacacaaagggtgctaacctttgtgttttttaattaattaaaatgtttattaacttagttaaggagtagaatggaaaaggggatcggaaaacaagtatataggaggagacctatttatggcttcagaaaaagacgcaggaaaacagtcagcagtaaagcttgttccattgcttattactgtcgctgtgggactaatcatctggtttattcccgctccgtccggacttgaacctaaagcttggcatttgtttgcgatttttgtcgcaacaattatcggctttatctccaagcccttgccaatgggtgcaattgcaatttttgcattggcggttactgcactaactggaacactatcaattgaggatacattaagcggattcgggaataagaccatttggcttatcgttatcgcattctttatttcccggggatttatcaaaaccggtctcggtgcgagaatttcgtatgtattcgttcagaaattcggaaaaaaaacccttggactttcttattcactgctattcagtgatttaatactttcacctgctattccaagtaatacggcgcgtgcaggaggcattatatttcctattatcagatcattatccgaaacattcggatcaagcccggcaaatggaacagagagaaaaatcggtgcattcttattaaaaaccggttttcaggggaatctgatcacatctgctatgttcctgacagcgatggcggcgaacccgctgattgccaagctggcccatgatgtcgcaggggtggacttaacatggacaagctgggcaattgccgcgattgtaccgggacttgtaagcttaatcatcacgccgcttgtgatttacaaactgtatccgccggaaatcaaagaaacaccggatgcggcgaaaatcgcaacagaaaaactgaaagaaatgggaccgttcaaaaaatcggagctttccatggttatcgtgtttcttttggtgcttgtgctgtggatttttggcggcagcttcaacatcgacgctaccacaaccgcattgatcggtttggccgttctcttattatcacaagttctgacttgggatgatatcaagaaagaacagggcgcttgggatacgctcacttggtttgcggcgcttgtcatgctcgccaacttcttgaatgaattaggcatggtgtcttggttcagtaatgccatgaaatcatccgtatcagggttctcttggattgtggcattcatcattttaattgttgtgtattattactctcactatttctttgcaagtgcgacagcccacatcagtgcgatgtattcagcatttttggctgtcgtcgtggcagcgggcgcaccgccgcttttagcagcgctgagcctcgcgttcatcagcaacctgttcgggtcaacgactcactacggttctggagcggctccggtcttcttcggagcaggctacatcccgcaaggcaaatggtggtccatcggatttatcctgtcgattgttcatatcatcgtatggcttgtgatcggcggattatggtggaaagtactaggaatatggtagaaagaaaaaggcagacgcggtctgcctttttttattttcactccttcgtaagaaaatggattttgaaaaatgagaaaattccctgtgaaaaatggtatgatctaggtagaaaggacggctggtgctgtggtgaaaaagcggttccatttttccctgcaaacaaaaataatggggctgattgcggctctgctggtctttgtcattggtgtgctgaccattacgttagccgttcagcatacacagggagaacggagacaggcagagcagctggcggttcaaacggcgagaaccatttcctatatgccgccggttaaagagctcattgagagaaaagacggacatgcggctcagacgcaagaggtcattgaacaaatgaaagaacagactggtgcgtttgccatttatgttttgaacgaaaaaggagacattcgcagcgcctctggaaaaagcggattaaagaaactggagcgcagcagagaaattttgtttggcggttcgcatgtttctgaaacaaaagcggatggacgaagagtgatcagagggagcgcgccgattataaaagaacagaagggatacagccaagtgatcggcagcgtgtctgttgattttctgcaaacggagacagagcaaagcatcaaaaagcatttgagaaatttgagtgtgattgctgtgcttgtactgctgctcggatttattggcgccgccgtgctggcgaaaagcatcagaaaggatacgctcgggcttgaaccgcatgagatcgcggctctatatcgtgagaggaacgcaatgcttttcgcgattcgagaagggattattgccaccaatcgtgaaggcgtcgtcaccatgatgaacgtatcggcggccgagatgctgaagctgcccgagcctgtgatccatcttcctatagatgacgtcatgccgggagcagggctgatgtctgtgcttgaaaaaggagaaatgctgccgaaccaggaagtaagcgtcaacgatcaagtgtttattatcaatacgaaagtgatgaatcaaggcgggcaggcgtatgggattgtcgtcagcttcagggagaaaacagagctgaagaagctgatcgacacattgacagaggttcgcaaatattcagaggatctcagggcgcagactcatgaattttcaaataagctttatgcgattttagggctgcttgagcttggggagtatgatgaagccattgatctgattaaagaggaatatgcgatacaaaatgaacagcatgatcttttattccataacatccattcgcagcaggtgcaggccattttgttagggaaaataagcaaggcatcggaaaagaaggtcaagctggtgattgatgagaacagctcactcgcgcctcttcctgcgcatatcggcttgtcccatcttattacgattattggcaatttaattgataacgctttcgaagctgtagcggagcaaagcgtgaaggaagttttgttttttatcacggatatgggccatgacattgtcattgaagtatcagacacagggcccggtgtgccgccagagaaaatagaagctgtgtttgagagaggctattcttcaaaggggatgaggagaggctacggtctggccaatgtgaaagactcagtgcgtgaactgggcggctggatcgaactggcgaatcaaaaaactggcggggcggtattcactgtatttataccgaaggagaaacaaagggggaatccatttgattcacatcgcgattgcggaggatgattttcgagttgcgcaaatccatgagagattgattaaacagcttgatggattcaagattatcggcaaggcggctaacgcaaaagagacattggcgcttttgaaggaacacaaggctgatttgcttctgctggatatttatatgccggacgagcttgggaccgcgttgattcctgatatacgaagccgatttcctgaagtggacattatgattatcacagcggcaacagaaacccgtcatttgcaggaagcgctaagggcgggaattgcccactatttgatcaaacccgtaacagctgacaagttcaggcaggtgctgcttcagtataaagaaaaaaggaagctgctcatgtctcagccggaggtcagccaatccatgatcgaccatatttttgggaacggtgtgaagacagctttgccggcagaggatttgccgactggcattaattcgattacactgcgaaaaattaaggaagcgcttcagactgcgtcagaaggattgacagcggaggaacttggggaaaaaatgggggcgtcacgaacaactgcccgccgttatgccgagtaccttgtgtcaaaggaagaagcaagagccgagcttgaatacgggattatcggcaggccggagagaaaatattatttggcggcggattagatatgaaaaaatctataatcctattgaatattctattgatctttatgcagggtgatatcaggcaggcggctgcgccgcgcctgccggacgggccgatagaaattgtcgtccctgccgaaccttctggcggctgggatgtcacagcgcaggcgatccaatcagttttgaggcagaagcagatcgtgaaggatgatgttcatatcgtctataaatccggcggcgggggagagaaaggctggaaatatgtcaacaaaagcagcaaacaaaccatcagcatgacgtccagcctaatattgagcaatgatcttctcgggcaaagcaaattaaaaatgtccgattttacgccgctcgccattctctccaaggaatggcagacggttgcattgccaaaaggatcagcgttaacaaatggcaaggatgtgctgaatgagatcaacatgcatcccggcaaggtgagaatcggctttgccccggggtttggcaatgatgatcagctctcgttcgtcagagcggcagatatgtacggcattgacccgtttgacattcaattctcacagtatgacagcagcgaacagctcattcaggcgctgatcagacatgagatagaagcggcttccatgacactttctgaagcgaaaccatatgaacgaaacggcgatatcacgttagccgctgtaacgtctgataaaagacttcccggttttccaaatgtaccgacgtggaaggagcagggaatcccgtttgttttttctcattggagagggattttgggcccgaaaaatatgtctgaggaagagatttcttactgggatcaagcgctaaagaaggtcacctcctcacctgaatggaagcggaaaataaacgaacaggactgggaaagcttttatttaaacagcagggaaacgaaacggtttttagaagagcaatctgctttttatcaaagcatcatgacaggaaattaaaatcccgacatcccgggatttttttcatgccgaaaattgatcaaaaagaacaaaacggttttaaaaaattaaaaatacaaaaaaaccaaattatttacttgcggttggttttcccatacgatggcaaaaaggcaagacaaaaaggggagtaagggagaaaaaaatgtaagcggattcatttaagggggaatggatgtgttagcaatcttaggctttctcatgatgcttgtgtttatggcattgatcatgacaaaacggctttctgttttaacagcattagttttgacgccgattgtgtttgcgcttatcgccggatttggatttactgaagttggggacatgatgatttcggggattcagcaagtcgcgccgactgcggtcatgattatgtttgcgatcttatattttggaattatgattgatacaggcctgtttgatccaatggttggcaaaattttaagcatggtcaaaggagaccctttaaaaattgttgtcgggacagcggttcttacaatgctcgtcgccttggacggagatggctcgacaacgtacatgattacgacaagcgccatgcttccgctctatttgctgctaggcatccggccaattatcttggcaggaatcgcgggagtcggcatgggaatcatgaacacgattccatggggaggtgcgacgccgagggcggcgagtgcgctgggggttgatccagctgagcttacagggccgatgattcctgtcattgcaagcgggatgctttgtatggtggcagttgcgtatgtgcttggaaaagcggaacgaaagcgccttggtgtgattgaactgaaacagccagccaatgccaatgaaccggctgctgcggttgaagatgagtggaagcggccgaagctttggtggttcaatttattgttaacgctttctttaataggatgtttagtatcgggtaaagtcagtttaaccgtactgtttgtcattgcgttttgtattgcgctgattgtgaattatcccaatctcgagcatcagagacagcgcatcgcggcgcattccagcaacgtgctggctatcggttcaatgatttttgctgcgggggtgttcacggggattttgacaggcacgaaaatggttgatgaaatggcgatctcgctcgtgtccatgataccggaacaaatgggcggattgatcccggcgattgttgccttaacaagcggcattttcacatttttgatgccgaatgacgcgtatttctacggggtgctgccgattttatcagaaacagctgtcgcatacggtgtggataaagtggaaattgccagagcctctattatcggccagccgattcatatgctgagtccgcttgtgccatccactcatttgcttgtcggactcgtcggagtttctattgatgaccatcaaaaattcgcattgaaatgggcggttctcgcagtgatcgtcatgacggctatcgctctattgatcggtgcgatctctatttccgtatgataattcaggcgtaatgacacacactaacggcatacaacattccggaggtgtcattatgagtgatccttatatgccgctgacttcagtcagaagcggagcggggttcgaagcggcaaaaggggtgcacggcctgactgtgcaaattgcgaatgtctattttattcagctgccttctgaacctcactcatttgttttaattgatgccggcatgccccaatcagccggcgtgattgtcaatgaagccaaacaaagattcggtgaagggtttcagctgaaggcgattatcctcacacacgggcactttgaccatattggggcaatcgaagagatccttgagcattgggatgtgcctgtttatatccattctcgggaaatgccttatgtaacaggtaaagaggattatcctccggctcgtcctgacagcaagagcgggctggtcgctaagctgtcgccgctgtttccgcggcactctatcgatatttcctcacatgtccaggcactgccggaagacggttcagttccttttcttgacgagtggatgtggatcgcgacaccaggacacacgccgggccatatttcgttattccgcgatgacggccgcgtgcttgtggcaggtgatgctgttattacagtggaacaggagaaaatggctgacgtcttgatacaaaaacaggagcttcacgggccgccggcttatttcacgcctgacacagagacggccgctgagtccattctaaagctggccggtcttgaaccggaagcgttattgaccgggcacggcataccgatgaccggcaaaaactttcgaagtgacttaactgaattggcaaatcggttatcgtctatttgacacccgcaccacgcgggtgttttttattgttttccaggaagttgcagaaaaatcatttgtcttgccgcttaaaaacgatacaatgaaaagcatgaagtgatgtgaaggggagagtttgttggaagaaaaagaaatactctggaacgaagcgaaagcgtttattgccgcatgctatcaggaattgggaaaggaggaggaagtgaaagaccgtctcgcggacattaaaagtgaaattgacctgaccggaagctatgtacatacgaaggaagagctggagcacggagcgaaaatggcttggagaaacagcaaccgctgcatcggcagattgttctggaattcgctgaatgttatcgacagacgagacgtccggacgaaggaggaagtgcgtgatgccctctttcaccatattgaaaccgccaccaataacgggaaaatcagaccgaccattacgattttccctccggaagagaagggtgaaaagcaagtcgagatctggaatcatcagctgatccggtacgctggatatgagtcagacggagaaagaatcggcgacccggcttcctgttccctgacagcagcctgcgaagagctcggctggcgcggagagcgaacggattttgacctgctgccgctcatttttcgcatgaaaggggacgagcagcctgtctggtatgagctgccgcgttcacttgtgattgaggttccaatcacacatccggacatcgaggcgttttctgatttggagctgaagtggtacggcgtgcctattatttctgatatgaagcttgaggtcgggggcattcattataatgccgcgccatttaacggctggtatatgggcacggagatcggagcgagaaacctcgcagatgaaaagcggtacgacaagctcaaaaaagtagcgtccgtgatcggcatcgccgctgattacaatacggatttatggaaggatcaagcgctagttgaattgaataaagctgtgctgcactcgtataaaaagcagggtgtcagcatcgttgaccatcatacagcggcaagccagtttaaacggtttgaagaacaggaggaagaagcgggcagaaagctgacgggggactggacgtggctgattccgccaatttcacccgctgccactcatatcttccaccgctcctatgataactcaatcgttaagccgaactatttttatcaagataagccttatgagtaaacaatagaaaatcgatgatggccttcaaggctgcgggattcagtcacagagatgtcggtaacctttgagaaagggcttccgttctttacagcctcaacaaacgattgcagggcgttttccggaccctctgccaaaatctcgacacgcccgtcatcacggtttttgacccagccggccagttttcgcttatcagcttccatttgaacaaaatagcgaaagcccacaccttgaacccggccgtctacaatgattcggtattgaagcatgtaaaaaccaccttttctttttatgataatcaatcattttacaacctgtaaaggggatgtgtttgtatgaaacaagagcgctattcagttctttctcttaatctgggaaaaccgcagacgcttgaatatgacggaaagaaaatcgaaaccggcatcatgaagcggccggctaaatcagccgtcatgctgtatcgggagaattttgaaggagacggacaggcggacctcgtcaaccacggcggacctgataaggctgtctgtgtctacccggcggagcattatccgttttgggaagagttcctctcaagaccgctgtcaaatgccgcatttggagaaaatctgacggtcgcgggcctgactgaggagaatgtttgcatcggggatgtgttcagacttgatgaagctgttgttcaggtcagccagccgcgccagccgtgtgtaaagctggcgaaaaagtttggtgtaaaagaaatggtgctgaaggtccagcaaaccggctatacagggttttattttcgcgtgctggaggagggcagggtgtctcccggcgcgaaccttgaattgctgtccagaggagagaaaggcatatccgtccagttcgcgaaccgcatcaactaccatgatgcaaaaaatctcaccgccattgaacggattttaagtgaggctgcactatcggaaagctggagagcgtcctttatgaaaaaaaaggacaggctgctgccggttgaatagaaaaaagccgcgcatatcaacgtgcgcggctttgccatatttaagattgttttttctttgattcaagcaggttggcaagaaaataggttttatagctttgaagctttcttccttcatggtgcgtgatcccctgcttttttagttctgccacataccagcctttactgccgtaatgcatgtcagaaaactcctttccctatctgatttcgaaacgattggcattgtaacatctataaaaagatgctgaaaagagatgcggggaaaactgagcctttcgcactagatgtacgaatgttcttctgaatgtatatgcggagcaaaagccgaatatgatttaatggccggttagtttgatcatgacaacgccaaatgtcataatggcgaaaacaatgccgatatatgtgagcatcccgttttttttcttaacgccgtaaacggtcataatgatgccttcaatgaaaaaaatgatgccgaaaataataaaccacatgcagataaaggctcctttcacagacataatagtagtgtagcatatctgaaagagccgggctgtgacaatatcaagaaagccgggcgcatatcgcccggctcatgttttattgtttatcaaccaatttgaccagaagctgtgccaaatgttctttctcatcttcgtctgcaacgctccaaagctcttgcagcagcatttcttcaccgttttgcggctcttcatgctttgcgaggtagtctcccaggatcgcagcgctttttacaagcttgccgtcatccaatcccagctttttgcctcggttgacttgttttttcaggtagcctttaaattcctcaaagtcttttaaaatgtcttcttttattgtgccatgcatcgcgttcatttcgttttcaatttggattttttcttgatctctgttcattgcaagacctcctcgtacagaataatgatgctttacctgcaattggaggaggttaaacctgccggaagcccggaatgtgttttacagtttcgtcaggataatcggttcatcttttgtgatgacgatcgtgtgttcaacttgggcaaccatgcttttatccggcgtcttgaacgtccagccgtctccagcttcaacaatcgtttctgctttcgttgaaataaacggttcaagcgcgatgactgtgccatttttgaacagcgcattatcaaacggatcataatagttcatgatgtggttcggcgcttcatgcaggcttcggccgattccgtggccggtcagggttttgatgacggtaaagccttgagagcgtgcttcatgataaacggctcttccgatctggttttggcgcttgcccgcttttgcctgctgaagccccttttgaaaagcgttttccgcgcattggcaaagcttatgaaggcgttcttctccttcaccgagcacaaatgagatgcctgtgtcggaatagaagccgccaaattcagcggagatgtcgatgttgacaaggtcccctgcttttaaaattttggatgtgcttggtatgccgtgagccacttcatcatttacgctgatacatgtcacacctggaaaatcgtattccttctcaggagctgaaacggcgccgtgctcatcaagcacagcttttccgataaggtcaaggtcttttgtgctcatgccgggctctgccttccgcttcatttcttcacgcgcaagcgcgacgattcttccgatttttttcaggccttctaattcttgatcgtttgttacaatcatctgtcattcccgctttctttttaaataatctagattaagcttaccacaactgtcttaaaaataggaaacacacggacctgggaaaaaagaaatacccccgggaaaattggtatagatcactagatatcttatatggtatatttgaaaaaaaagggtatgagggggatgggtatgctttcatttttacaaaaactcgggaagtcatttatgctcccgattgcggttctgcctgcggttggaattatccttgcgcttggcagagaggatgtatttaatatcccgtttgtctatcaggcggggacggcggtttttgatcatctgccgcttatttttgcgatcggtattgccatcggcatttcaaaagacagcaatggggcagcgggtttatcaggggcgatatcgtatctgatgcttgacgcggcaacaaagacaattgataaaacaaataacatggcggtgtttgggggaattattgccggtttaattgccggttacacctataaccgcttcaaggataccaagctgcctgaatatctcgggttcttcagtggcagacggcttgtgccgattttaacagccattattacgatcattttagcgggcatattcggagtggtctggccgccgattcaatcgtgtatcaactcgtttggagagtggatgctcgggctcggcggcatcggggcaggcatattcggcctattcaacaggctgttaattccgcttggccttcaccatgtgctgaacaatattttctggttccaattcggagaatataacggagtgacaggggatttggcgcgctttttcgcgaaagatccgactgcgggcacatatatgaccggatttttcccaatcatgatgttcggtcttccggcggcgtgtctggctatggttgtgactgcgaagccgtctaaacggaaagcgacggctggaatgatgattggatttgctttaacggcgtttatcacagggattacggagccgattgagtttgcatttatgtttttatctccgcttttatacgctgttcacgcggtcttaaccgggttatctttatttatcgtcaactggctcggcatccgctcaggcttctctttttcagccggagctatcgattatgtgctcagctatggaatcgcggaaaaaccgctgcttctgcttttggtaggtatatgctatgcggcagtatactttatcgtgttttatgtactgattaaggctttgaatttaaaaacgcctggacgggaagacgatgatgtggatgaagtgctggatgaaaatactgttcaggatgtaaatgaaaacatcatgctgaaagggctcggcggaaaagaaaaccttcaaaccattgatcattgcgccacaaggctgcgactgactgtgaaggataccgctttggtggatgaagcactgctaaagaaagcaggcgcaaaaggggttgtcaaatcgggcgggcaatcggttcaagtcattattggcccgaatgtggaatttgcagctgaggaattgagggctgctgtcaaataaaaaagcggagagggcaacctctccgctttttcttatttatcttcgttatcctttgacgtttcggaagaatcttcgtcatgttttgtgtaatcataatcagaaggattcaccttcttaaaacctttcggctcgtagaaccgcagcaggtctccgtttatgattttatcggacatttcaagttccttcttgacgagtgagtcttctgacttgtcgacttcggattcatcgagttcttttccggttttcgtgtcgtaatacttaccggatattttcgtgtacttcggtgaaataaagtctccgtttcggaacggaatcacttcacggtgttctttcgataaaatatcagaaccggacatcagatagtccttcgtatccactccgagcagatgcagaatggtaggagccacatcaacgtctccggcatatttatgaactttctcgcccttcacgccggcagcgtggataaagagcggcacccgttgaagctgggcgttgtcgtaatcagtgatttcatccttgccaagcactttcgccatcgctttattgtggttttcagagatgccgtagtggtctccgtacatcacaataatcgatttatcatataacccgtcttttttcagatcattgaagaattgttcaatggactgatcaaggtaatgggctgactggaaatagttatcgacgacagagtcaccaaagtctccagccgggaagtctgtatccccctcatccattccgaatgggaagtggttggaaagggtaatgaacttcgtatagaacggctgcggcaggctttccagcagcggcattgattctttgaagaacggtttgtctttcatgccgtagtttttcgtgttttcttcgttcatgtcatagtaagcagaatcaaagaatttatcaatgccttccgccttgtacatttcgttacggttccagaacgtctgcgtgttcccgtggaaagtagcagatgtgtaattcttagacttcagaatcgccggaacggattgcagcgtgttttgcgctttgtttacgaaaactgaaccttgagccagcgggtacagagagttttccatcataaattcagcatcagatgttttaccttgtcccgtttggtggaaaaagttatcaaagtagaacgtttcgttatcatgtgccagtttatttaagaatggtgtcacttctttgccgtcaattttatagtcgatgataaatgactgcaaagattcaagtgaaacgtaaatgacgttttttccttccgctttgccgaaatacacgttattcggcacatcgtaattggctttcatgtagttttctacttccgttacgtcgctggaatcggcaagcgcgcgctggctgttggacttgatattctgtacagcgtcataaatcgtgaaattgtatgttcccaagtatttcacaagatagttccggtcgaatgatcttgtcagcaattcaggacggtctgattccgcaactgccaggttgatcaagaacacaagaattgaagacgcaaaaataattcggaacgattttttgcttgacgtttcggcaggcttgtttactttgatcgccaagatgatcaggatgatcgtatcgataaagtaaaaggcgtcagtcggtctcatcagcgaaaatgcgctgtcaccgagttggccgccgtttgttttagcctgcataatgaccggaattgtaataaaatcattgaaaaatctgtagtacacaatgttggcgtacagtaaaaaagacattaaaaaatgaatcactataatggctgtctgctgtaattttttcttgaacaagagtccaaagccaagaaagaacaagcttgagctaagaggattcacaaaaagcaatattttttgtatcgtgttgtctattcctaagttgaaattcaggacataaccgacatacgttttgatccataacaggacgaccgcaattaagaagaaggccagtcctctttcttttataaatgttttcattgttacactccttttttccgatccagttcgagcgaaacgatagaaaaaacgaacgtatccaatataacacgaatcagcagattagaaaagtgaaaatcgtatgagggagaaagtggcgaaaaacgccgtcgaatcaacgtttcgctttgatattaccaaatgtaaaacaaggtatctttctagaaataaaggaataaaatggtacattgagaattgtatgataaaatataaggtatagataaaaagaggtgaaatgatggatttttcccatattgtgtctgaagataaaattaagcgcgccatcaaagacggggactttcaaaacctcccgggaatggggaagccgctgccgaaggatgacgcggcacacttgccggaatcgctgcgcatgggctatcgtattttgaaaaacgcgggaatggcagaggacgagggcgcgctcaaaaaagagcttatgaccatcgaccatttaatcgaaaagtgctatgacgaaaaagaacgcgagcaattaatcagaaaaaaatctgaaaagcaattgctgcttgataagcttgtcgacaaaaaaggcatgttttcaaagccagcatccgctttttataagaataaagtatatgaccggcttggacgaaacagaccttcttccagctgatttgtcttgtctgcaggatggcgattgataaaagccatcctttttatgttccaagttctatgtcaaaaggtttatgtttttccatctatgggaaatgattcataaacgaaaaaagggtgatgggatggaacgactattagtatggatagagcatatatctgattggctgtggggtccgccgctaatcatcctgctgacggggacgggcttgtatttcactattttgctgaaaggttttcaatttcgctatcctttatacattttcaaacagacaatcggcagtgtaggaaaaaagccgaagggagaaggcacagtcacaccgcttcaggcattgacctcagccctcagttcaacgatcggtgcagcgaacattgtcggtgtgcccgccgctattatgtttgggggaccaggagcggttttttggatgtggcttattgccttatttgccatggcgattaagttttctgaaagtgttcttgctgttcattacagagaaaaaaatgagcagggtgaatacgtcgggggaccgatgtattacataacaaaagggctgcgcatgaaatggctcggcgtattcttctctgttgcgctgattgtggagctgattcccagcattatggttcagggaaattcggtttcagtctcgcttgccgagacgttttctttcaataaaatatacgcaggaatcggaattgcatttttgattgggttagtggtgataggaggggtaaagcggatcggaaaagtaacagagtttgtcgtgcctcttatggcaggggcatacgcaggtgccggtctcctgattgttctcatgaatctatcatcagtgccggcgtttttctctctcgttttttcaaatgcgtttacctcttcttcagcagttggagggttcgcaggtgctgcgttggcggaaaccgttcgctggggatttgcccgcgggctgtattctaatgaagccgggatgggaacagccccgattgcacatgcggcagcaatgactgatcatcctgtgcggcaagggttttggtctgtgatcggcattgtcattgacaccttaatcatctgtacgactaccgcttttatcgtccttgcatccggtgtatggacagggaagaacgcctcaaatgacccggcagcactgacaacggccgcatttcagcactatttcggttctggaggaggatacttcgtttcggtttccctggtcttctttgtcgtatcaaccattatggttgtcattttttacggcgtaaagcaagctgaatttctgttcgggcggctggcaggacatgtgattaaattcgtttatttagcggctattatcataggtgccgcaggcggagcaaaagccatttggggcgtattggacttagcattggtttttattgttgtcccgaatgtgattgcgctcttgttattgagcagaaaggtaaaagcgctgtacaccgaattctttacatctgaacagtactacctgaaagatataagaaaaacgaaacaaaagcctgtttatccaacaaaagaagctaaaaattcctagtgttttgcttttgcgccgaacaatgctttgctttttatgatcaaataaatgagtaaaggcagcaaaagagaaatcactacattaatgattggtttgattctgttaaagtcgattagctgatttgtatttaaaaaaaaccaaaagccgcatacgactgagaacatgccggttggtgtatacatggctttcgggtcgatttttgagtgtaaaaacgaaaggccgtataccacgatatatagggaacctgctatcttcaccataatgaccggaatccaaaaagccgcgatgatcaggtctgagcgatccagaaaatccgtaatgcggatctgcctgatgaccatataagcaggatcaaagaaagtagatgtcaggttgggaccaaagacagaaattgaagaaaataacatcacggccagcaataaagcgcccagcagtatcgcgaaaatggtgtattttagcgggacgctccggtttgagaagagaagcggaaggataatcaattcccccattgtcccaaacgcgtaatagcctgattgaaggtatgggattagaccttcaaaaacaggtgtcaagttttgaagctcaatttgtgtggccagcgtaaatggaaggaacaagaccaggatgccgaatggaaataggaatatctgcgccattctggtcaatgtttcttttccctctctggcaatacagatcgccacaaagataataacaccgccaagaacagccattggtgttctcgggagaaataaaatgttaatcaaattgatgaaaaaacgtatatcatgagcattgattaacaggaaatacaaagaaaacagtaaaatgataatccggcctgcgattggtgaggaatcgctcagcagctcatagatatttttatcctgatgctttttcatcagcctatgcatgagccagagtgccggaatcacgatgacaacgccgaggatgtagctgtgccaggcattttgttttgctgattcgatcatgagaatcggagcatgctttaatccgactgctaacgtatacagagctccgaaaaataatccttggtatgcagaggtcttgtccataaagcacatcctttctgtcatgttcaaaacggaatatatttaaacaggtgccccagccgcggaagcaggggattcactctcatataaatccatagaaaagcacttcctgcaattagcaggctgaaggcccattttgttagattgttagcggaacgaaaattcttccattcatatgcgtatatggcaatgcacacaatcaatgtctgtacgatatagctgatcatgctgacgcacctccattaatggctgatcgttttgtataggacaccgccctgctcaatcgtcacaattgggacgacgtgaacctccatatccttatatacctcttcccattcctttttcagcagattcttcgtggttgccgtgcttctgatggtcctgtcttgaaagccggccgggtccgcctttagcttttgcaaacgatgaacggtgctgatcacgtccttctttatggttctgtttaatgctttttgaatgatgtaatactggtcattttctctcgtctcataggttgattggttttccataataattcctttggctctgatctcgattgtcattgacagctttccgtttttttcagcggcatgaaaggatgcattggacttttgaagctgaatggatgcttgccccatttgattcggcaggtctactatgaattctggctggcgggcttgattcagcaacatcagggctgctgtcatgtgttcatctttgaaaatatccatcaatctgtcctttttaaagatcgcaagcccgtcaattttcaaattagatttgcctttccctccaggttttgttttagatgcagagatgaccggtgcatacggatcactgcctatttctactagatcagacatgaatctgcttaagaaaacggggcggctcgttgcgataatggccagctcccgaatcatttccgccggaaactgttcaagctgaacatcggtatttaaaatgtcccgcgcttctccccggctgactaaaatgagcgccgttaatctgttctgcggatttcgcgttaaaatatcaaagactggggcaacgccgtctctcgccatatcctctccaataatgactgtacgtctgtgggacgtattgattgtccgtgacaaggaggtttgcagcttgttgttcgcttctctgatcgtagtgccggaagctgaatcaacataccatgtttttgaaccggcagttccgccgccgccccctgtttgtccgcctaattggccgaccaagggaatctgcatggccactcgatactgatcttttttcttatcaatggctgagctgacaacaaatgcaatgtcattgatttctgtccggtcccagcaccccgttagaaggatacaaatgagaagcggcaaaacacacttatatattgttttcttcatcttttgggtcctctcttttcgctcccttctgtccgttgccgcgcgaatacgtgcccggccttctggtcatcgtccaccaaggcgccctgacaaaaatatcttttacttcatctcgtttaaacggagaaatcccggataaataaggaatgccgaaagattgcagcttgcataaatgaagcactaagataatcgtgccgagcataatgccgaatatcccaaaaatactcgccaaaaacataagcgggaaacgaagcatcctgatggagatagctaagttaaaccgcggaattgtaaatgacgcgatccctgttaacgatacgatgatcaccatgggggcagacacaattcccgcttcaacagcggctgtcccaatgactagggccccgagaatactgacggtctggccgatggttttcggcaggcgcactcccgcctcacggagagcctcaaaagaaatttccataatcaatgcttctatgatggcggggaaaggaatcggttcacgcgcagaggccacactgaacattaagtttgtcggcattaagtcctggtggtatgtaataacggcaacataaatagccggcaaatataaagcaacgaataaaaacatatagcgaagccagcggattaagttagacatcaaataacgctcatagtaatcttcactggcctgcataagctgccaaaacgtaatcgggcctgttaagacaaagggcgtattatctgtgaaaatggcaaatcggccttcgagaagctgggcggcgacggtgtccggcctttctgtgtattgcagctgggggaatggcgagtacgtgtcgtcttcgataaattcttcaatatatccgctttctaagacagcatcaatctttatctttttgattcttttttttgctttgtcaataacctttggatcggcaagcccgtcaatataggccaagacaacatcggttttggttttcgtgccgattttaaaagagatcattttaagctgaaacgttttgacgcgaaagcgcacaagagcggtattgaccctgaggctttcagtgaagccctctcttgaccctctgatggtcgattctgttatcggctcttcaatgcttcttctttgtccgccttttatatttaagatcaggccttttgagtgcccgtcggcaaataaaaccgcgttcccctcaatgatggatgcagccactttgctcatactcgtttctaatgcaacacttgaaattgatagagtattttgcagcgcctcttcatgttcatctatttgatccgtcaaatgcattaagaaagggcggagggcgtgatcctgaatatgttcagattttacaattccttcgatataaacaataaatccgcacagcccgtttccaaagtcaaattgtctaaatacgatgtctgagcagccttctgttaataaggtcagattttcgaggttttccttcaaattgggagagatcggtctgtcctgattgtcttcaagctctttgatgagctgaagcgctttgtcgcgtttattcatagaggctcaccctgctttttaatgtcatattcaataagtgcttgtgacttttagggtaaccttgtctgtttcatatattccagactaggatgaaagcgctataaaaaagtgttgactacctgtatatacaggaatacaatatgattataagttgtatatacaagttataaaaacggatacggaggggttggcatgggggaactgaacaaatcggcacgtcagattgtcgaagcagtcggcggtgctgaaaatattgcagcggcaactcattgtgttacacgtttgcgttttgctttaatagatgaaagcaaggttgaccaagagatgcttgatcaaattgatgtggtaaagggatcattctcgacaaacggacagtttcaggtcgtaatcggccagggaactgtcaataaagtatatgctgaactggttaaggaaacggggattggcgagtcaacaaaggatgaagtgaagaaggcctcagaaaaaaatatgaatcctttgcagcgtgctgtgaaaacgcttgcagatatttttattccaatattgcctgcgattgtcacggcgggtcttttaatggggatcaataacattttaacggcggaaggcattttcttcagcacaaaatcgattgtgcaggtttatccgcagtgggcggatcttgctaatatgattaacctgattgcaggcacggcctttacgtttttgcctgcgttaatcggatggtctgccgtcaagcggttcggcggcaatccgcttctcggcattgtgctcggggttatgctcgtgcatcctgatttgctgaatgcgtggggatatggcgcggcagaacaaagcggagagatcccggtatggaatctattcggcctagaggtgcagaaagtcggctatcagggccaggtgctcccaattttgcttgcttcttatatgctggcgaagattgaggtatttttaacaaaacgcacacctgagggcatacagctgctcgttgtcgcaccaattacgcttctcttaacaggatttgcctcttttatcattatcggcccgattacatttgcgatcggtaatgtactgacttcagggcttatctcggtgtttggttcttttgccgcactgggcggtctgttatatggcggtttctactcagcgctcgtgattaccggtatgcatcacacgtttcttgcagtcgacctgcagctcatcggttcaaagctcggcggcacctttttatggccgatgctggcgctttctaatatcgcacaaggttcggcggctctggccatgatgtttatcgtgaaggatgagaaacaaaaaggcctctccctcacatcagggatttctgcttatcttggcattacagagcctgccatctttggggtgaatctgcgatacagattcccgtttatcattgcaatggtcagctctggcctggccggaatgtatatttcttctcaaggtgtgctggcaagctccgtcggtgtcggcggcgtgccggggattttctcaatcatgagccagtactggggcgcgtttgcaatcgggatggctattgtattgatcgtgccgtttgccggaacatacgcgtatgcgagattcaaacataaataacaagtggggagcgggacgtgttgaacgttcccttttcccgttttcaatttaaatatggtggtggaaacagatgaaaacagaacaaacgccatggtggaaaaaagctgtggtttatcaaatttatccgaaaagctttaacgatacgacaggaaatggtgttggcgatctgaacggcattattgaaaagctggattacttaaaaacgctacaggtggatgtgctttggctgacgccgatttatgattctccccagcatgataatgggtacgatattcgtgattattactcgatttatcctgaatacggaacgatggaggattttgagcggctagtgtccgaagcacataaaagagacctgaaagtcgtcatggatcttgttgtcaatcatacgtcaacagagcacaaatggtttcgcgaggcgatctcttcaatagacagcccgtaccgtgatttttatatatggaaaaaaccgcaggaaaacggttctgttccgacgaactgggaatcgaaattcggcggctcggcatgggagcttgacgaagcatcgggccaatactatttgcatctgtttgatgtgacgcaggctgatttgaattgggaaaatgaagaggtcagaaagcatgtctatgacatgatgcatttttggtttgaaaagggaatagacggctttaggcttgatgtcatcaacctgatttctaaagatcagcgctttccgaatgcggaggaaggcgacggccgctctttttacactgacgggccgcgggtgcacgaatttctgcatgaaatgaacgaaaaggtgttttcacattacgacagcatgacggtcggtgagatgtcttcaacaaccgtagaccactgcatccggtatacgaatcctgacaataaagaacttgatatgacattcagcttccatcatctcaaggttgactatcctaacggcgaaaaatgggccttggcgccgtttgattttttgaagctgaaggagatcctatctgactggcaaacggggatgcacgcaggagggggatggaacgctctgttctggtgcaatcatgatcagccgcgcgtcgtatcaagatatggagatgatggcgcatatagggtgaaatcggcgaaaatgcttgctacggccattcatatgatgcagggcacgccttatatttatcagggcgaggagctggggatgacgaatccgaagttcactgacataagctcctatcgggatgtcgaatcgctgaacatgtatcacgcctttaaggaaaaaggaatggctgatcaagatattacagccattttacaggcgaaatcccgtgacaattccagaacccccgttcagtgggatgctacggaaaatggtggttttacaacgggcacaccatggataccggttgcaggaaattaccgggaaatcaatgctgaagcggcgctgagggatcagaattcggtgttttaccattatcaaaaattgattcagattcgcaaaatgtatgacattgtgacagagggtacgtatgagataattgcaaaggatgacccgaacatttttgcgtatctcagacacggcagcaatgaaaagctgctcgtgatcaataatttttacgggacagaggcggcctttacactgccggactctttagcgcctgacgaatggaaggcagaggtgctgttgacgaacgatgaagcaagggaagggcttcagaacatgacgcttcgcccatatgagtccattgtttatcgtttaacgaaaccgtgttaaactaagctgggtggtccataatgaaggtgaataaattcatcacaatttataaagacatcgcacagcaaattgaaggcggccgatggaaagcggaggagattcttccgtctgaacatgagttgaccgcacagtacggtacatcaagagaaacggtccgaaaggcgcttcatatgctcgcgcaaaacggttatatccagaaaatcaggggaaaaggctccgtcgtgctcaatcgtgaaaaaatgcagtttcccgtttcgggccttgtcagcttcaaggagctcgcgcaaacgcttggcaaagaaacgaaaacaactgtacacaaattcgggctggagcctccgtcagagctgatccaaaaacagctccgggccaatctggatgacgacatctgggaagtcatcaggtctagaaagattgacggggaacatgtgattttggacaaggattactttttcagaaagcatgtccctcacctgacgaaagaaatttgtgaaaactccatatatgaatatatagaaggagagctcggtctttcgatcagttacgcccaaaaagaaattgtagccgagccgtgtacggacgaggacagagagctgctcgatttacgcggctatgaccatatggtcgtggtgagaaactacgtctttttggaggataccagtttgtttcaatatacggaaagcagacaccgtctcgacaaattccgatttgttgattttgcgcggcgggggaaatgagagaggcgcctgcctgcggcagcgcgcttttttgtttggtatcaaaattgatactatccaacaaaaatgtgcgtacttttactttttatcataatggctacaatagagatgagagtaatctaaaggagaggtgttttacatggcagatctaaagacacaaattctggatgcatacaatttcaggcatgcgactaaggaatttgacccgaataaaaaagtgtcagacagcgattttgaatttattttagaaacaggaagactgtctccgagctcactcggccttgagccttggaaatttgtcgtcgtccaaaatccggaattccgcgagaagcttcgtgaatacacatggggcgcgcaaaagcagctgccgaccgcaagccatttcgtcctgattcttgcgcgtacagcgaaggatatcaaatataatgcggactacatcaaacgtcatttaaaagaagtaaaacaaatgcctcaagacgtgtacgaaggctatttaagcaaaacagaagaattccagaaaaacgatttgcatttgcttgaaagtgacagaacattgtttgactgggcatcaaaacaaacctatatcgcgcttggcaacatgatgactgccgctgcgcaaatcggtgttgattcctgcccgatcgaaggcttccagtacgatcacattcaccgtattcttgaagaagaaggccttctggaaaacggaagcttcgatatttctgtgatggtggcattcggctaccgagtgagagaccctcgtccgaaaacaagatctgctgttgaagatgttgtgaagtgggtttaaaagaagaaagctgctcgcatagcgagcagctcttttttatgcctgattcgctctattctgttttctcctctgatgtaagtacattgccgttccgagtgcgctgatcagaaatccggccaacaggatcgagtacatggatgtggctgtgtccggaagcaggccgccagccggaccgtctgttcctgatccgcccgaaccgtttccaccagagccgttagtcggttgagtgccgggaggcgtatcatttcctccgtttccgtcagttggctgttttccgcctggtttgtcggagcctccgccatgattgccgtcatcaccgcctgtcggttgatctgacgggaatgccggcggtttgttgtttgaaccggaatttaagatcgtgtattcgctgaagtggtttgtatatcctgtcaccatatcatcatcgactgatccgtgacctgtctttgtgaaagctttcttttttctatcgacgtgataaatggcagggttatgggcttcttcaatatcaaacatgcgaagcgaaagctgtacgggctccttgaatgattttatttcttttcctttttgcttcactgtaaagtcatatacatctgacagtgacacatccaattctcccgtagacttgattccgattgcagtgtctgcggttttaaggttcgccattggcatcttcatgctgtaccagtagttgaacatcgtcaatgaaggatctgactctctttctttcaaaagtttgacctgatcttttttcactttaagattgataggcttctcttgagatccttcatgtattccataatagacaaatggcgtgttggcatttttagcataaatcgcaaatttgtcttcatcaagtgtccagctgccgtccttctgctttgtcggcaggaatacttctttgattcgtccttcaactttaggagagaccttgtttcctagttttttcagctgttcggtgaaaatctcataatcaacgtagccaaggtcttcaccatgggaggcttctgtaaagacagaatatccgtctcctccggcaccgacaaaattatttgttgccacgcggtaggtatcatccgtatttatagcaactttgtctccgttaggcgattcaattttcacttctaacacacggtgtccaggtttgttgtttaatgtaaaggtatattcgattccggccacctgagggaaagcgccgccgccattttccacattgcttaggccttgttcaagggcttctttaatttgttttccggttaaatcggccacgtaaagcgtattgccgaacggcatcacgttgagcacctcgccgagtgtgatatcacctttgtcaatgcctgctctgatgccgccgccatttgttatcgctattctggcgccggctgcttctttcgcttttgccagcataccgtccgcgatgaagtttccgagattcgtttctttcgtgcgcacatgctcacgctggccgtcaagcgccacatccgtgtagccgactttttcatttttcacgtcctctaattcatttttgaactgatcgagctcttgttttgcttctgggttttcttctgtatgttcatcaattggcagcacgctcagatttgatttatctgtttgcacaacgcctttttcatcaaacgcgacatcaacgcgccccaagaattggccgtattcttttgcctgcgccacgatcgtcggttcttcgttgttcacgacctccattttgtctacgagggtgtgagtgtgtccgccgatgatcaaatcaatgccttttacttttttggctagctcaagatcccggttatgtccgatgtgggttaaagcaataattttatttaccttttcttcttcttgaatcgctttgacggtgttttgtgctgtttcaaaggcatcattgaatacgatgcttttgcccgggcttgatgtggtggctgtatcttctgttgtcaggccgaatacggcgactttctccccgtcaacgtctaacagaatgtaagggtgaatgccggcctctttcttttcacctgccgtaaaggtttgcggctttttgacaaatgatttcagcttgggctcatttgacacatctacgtttgcactgacaatcggaaattccggcgcttcaaagtgatagcggttcgccggatcaacggttgcgctgtttccgcttagaaaatcagaaagcaccgtcgggcctttgtcaaattcatggtttccgaaggtcatggcgtcatagcccatcatgttcatcattttcagatcggccaaaccgttccatttagtaaaatacagatcgccggaaaacacatctcccgcatcaaggagaatattgtgatttgtttcgctgcgtacttcgttgattttcgtcattcgtctcgctgcatcatcgagatgggcgtgcgtatcattggtgtgcatgacggtcagatcccacagtccgtctttaggaggatctggatttgaatcatcatcgaattgcagcttatacacaccatagccttcattcgcagacttgcctacataagcgacatcgtctgctttatcggcaaatggcttggccaaaagcgaggattcaaacgtcagattcgtgccggaaacaggcgcgattgaccagttgttgtctgcttttggattgactgttttttgttcaataatgtaatccatcagcacctgcctattttcaactgcagagccgtggacaattttatcgctcgtcagatgagggaacccgccgcctccggacgcacgatagttattggtgactacgagaaattcctggcttgggctgatcggcttgccttcataggaaagattgatgatacgggatgaatccgcattgatcacttttccgttctcattgtatttagccggttttgtcacatcgacctgatatgtgacaccgtcaatcacgtcaaaattataggagcggaaattctcgttcagcaaggcctggtcgccgcctttagctggatcaatttgattgaattggcctgctgacatctccagccagtccttgacctcgctgcctgtcagcttgacgatttgaacagtattatcgtaaagatacaagtcaccgacatttttaatcgcaagatctccggctggaatgtttgtatagtaattggctccgtttctgccgcctgctttaaacggcgctccagcggataaaatcggcaggttcttgtactcggtatccttcatttctttttcagcgtaccacttttgcgcgtcagtcacgatctgaatggaaggatcatctttgacctgtgcaaagaagctgttaatatctgcttcggttttgccgactggctttcggacatactccagtgtgttttggtgtgtttgctgaatggtgtttgtaacggtttcgtttcttgatgtgacgttgccagcaatagattcaatacttcctttggaatctgctaccttccatgagccgtccgccttttcaagcttgaggtcaatcacgcctaaatatttgccccagctgcttggcatgacgacaggaatgccgttaattgttcccttttccacattgaactgagcaacacccgcatactcggcggaaggaaagagtccgtgctgatggcccgagataatcgcgtcaatgcctttcgttttggtggcaaggtcaaacacggcgttttctgcgcctgatgattgcgcctgcttttcaatgccggtgtgggcgagggcaataatgacatctgcgccttccgccttcattttcgggatcgtttcattggcggattctacgatatcctgcacctgaacttgcccctcgagattctttttgtcccatgtcatgatttgcggcgggacaaagcctatgtagccgacttttactttctgctcattaccgttttcatcaatgagggttttttcattaatcacatacggcgtataacggttttcgccgctagttgttttgacgttggcatttacaatcgggaaatcggctcctttgattgtgccgtcgagaaagtcgagcccgtagttgaattcatgattgccaagcgttccggcgtcgtatttcagcgcattcatgacgctgataatcggatgggttttcgtgccggagataatgtcgtctttttgatatttcaccgcgtattcacccagcggattcccttgaatcaagtcgccgttatccacaagcagggtgttagggttttgctcgcggtgcttttggatcaattgcgctgttctcgccagaccgaaatccgccgtttctttgtcgctgtagtaatcgtaatccatcatgttggcatgaatatcagtcgtagccaaaatactcagatgcacctgaggagccgcgctttcttctgcatgaatgggtggtgttgggaggattaggctaagtatcataattgggggcaaaagaatacggagaatgttttcgacgtgtgttcgtcttttctgtattctcaccagttctccacctttcaacgaaatttgtgttacagctcctattgtaagaatattttgtaactatttgtaggtgtttctttatgattattgtaaaagggagaaaaatgagtattatgtagcagtatcaaacgacaaatactgggcatttatgcttatcgtttgtcacaatcgcggaatgtttattttagtgtggctggggtagagtgttttatgtagacatataaagcgggaggttatgaatcatggggaaaaaaattgcagttgttttaacatattattttgaggacagcgagtacactgagcctgcgaaagcctttaaagaagcgggacatgaactgactgtcatcgaaaaagaaaaaggaaaaacagtaaaaggcaagcagggaacagcggaagtgacggttgacgcgtccattgacgacgtaaattcttcagactttgatgcgcttttgattcctggaggattttcaccagaccagcttcgcgctgacgatcgtttcgtccaatttacaaaagcgtttatgactgacaaaaagccggtatttgccatttgccacggcccgcagcttttaatcaatgcgaaagcgctcgacggccgaaaagcgacgggctatacgtccattcgtgttgacatggaaaacgccggtgccgacgttgtggacaaggaagtggttgtttgccaggatcaattggtcactagccgcacaccggacgatataccggcatttaaccgcgagtcattggcattgcttgagaaataagaaaaaacggacgctcttgggcgtccgtttttttgttgcttaggcttgagcacctgtcagtttcttgtacctgtaatacaagaaagcagctgcagccgttccgatgaccgcaatgccgaagtcgaatatgaaaatatgggcgatgccccccgcttttgcgataagccctgttgcaatcggcagcagaatcgatgcaagacttgaagcagtcgctacaattccggtaacggttccttttcgcttccagaaaagctctgtcattaacgtaatggtaatttgaaacacacccgcagttgaaaagcctaagaaaaaggcagtgatgtccagcacaactgggatatgaacggtcagcatgactgcgagcgtacataaagtaataataggatataagagcgttatgaagacaggtttgacccatctattcagcaaaacggctaataataaaacagatgccagagatcctatactataatagctcagcaattgtacagatgctgattcagctaaaccggctgccttttgcgcgtagctcgggagccagatttgagaaaccgtaaataaagccgtggatgtaaaaccgatgataatcagtgcggtgccttccttctgaaaaacgggttcagacaagaaaacgggagattcctgttggccgctattagttggtttcttatgttttttaggaaacgaaagcgttgataaataaataatattcaggagatagaccgctgccggcagataaaaagcaaatccgtaaaacatgctgtggtctgctaaaaatgtgatcaaaagcggcaaaagtgcggcccccacagacataaaggctttaaccaagacatttgccgaaccggaagcagacggaaagagctcggttagggccggatatgttccggcatccatggctgaattagcgactccggctaataaagcgaacacaaacgccagctcatagctcggtgataaaggaataccgactaaaaagacggccataattcccgcagaagcgacaacaagcggctttctgccgattttatctgatagaacgccggaaatgccgtatgtcagcagtttgccaaacccgatagcggcaatgacataactgatgccggtcggatcggtattccactgttttgttaatgaagacatattggatgcgagaatgatgttgaccatccccagaaagaagtagttgatatacattccggatgctgttttgatagatgtcgtttgcatgcttgtactccttcaaatcttattcgaacactttgctgttttggtttggggaaatgataaaaaagactcgccgagtttccggccagtctccattatttacgaagcgaggctaattcttgagcaatcgcctgcatttcacttgggctgaatgattcttttttcatcaccattctgtgaaggtacgtgaggtcttcaatcttctcatcactgaaatcctccgctttgattacgccgacgttcagcatgttcagcttttgggaaatctcttcaatcatttgagttaatgtttctgtatttgggctggacaaagggttccatcctttctatgcgcaatataggtatgttttattctaacagaattccatcagaaaaaaaccctattctaaaagcaggctgttcattccaaaaaagtgaagacatcagttgaaaagaaaatgaacatcctactaagatattcatgaaggtttctttttagagaaataggggcaaagaatagggaggttgcacatcatgataagcgtgttatttgtttgtttaggtaacatttgccggtctccgatggcggaagcgatttttagggacctggcagccaaaaaaggattagaggggaaaatcaaggcggactcagccggtattggcggctggcacatcggcaaccccccgcatgagggaacgcaggagatattgcgcagagaaggaatcagctttgatggcatgctggcgcgtcaagtcagcgaacaggatctggacgattttgattacatcattgcaatggatgcagaaaatatcggaagtctcagaagcatggcgggttttaaaaacacctcgcatatcaaaaggctcttggactatgttgaagattcagatctggctgacgtacccgatccttactacacagggaactttgaagaggtctgccaattaatcaaaacgggctgtgagcagttgcttgcatccattcaaaaagaaaaacaattgtgagtgaaaggagaatttgcatgaacaacgaacgtttaatgctgaaagggatatttctcggagctgcggcaggcgcggcgttatcactgctccataagccgacaagacaggcgtgcgggatgagatggctgacatgcaagcataaactttcactgtacaaaagcaacccagagctgttaaaaaacactgtcatcacaaaagtggatgaggccaaaaagctcgcccgaacgctttcaaaggaagtcgactttgtgaaccagcaggtgaaagagctgaagaaaacaacgccgcaagtgatggaactcgtgcaagaaacgaaagagcatttttcaaaaaaatgatcaaacatgcgaggtgagacgacatgagttttttgaaagagcttttcagcagatacacccttcatgaaggacaaagtaaatcagcggagctggcgtatttttttctattgtcactgtttccgtttttgatttttatgctgacgctcaccgcgtatcttccgctttctaccgatgatgttttaggagtcatagaacaatatgctcccgccagtgcgatgtcactcgttgaatccattacccatcaaaccttaaataatcgaaatggcggtttgctgtcattcgggattatcgccgcattatggtctgcgtctaatggaatgaatgcgatcgtccggtcgctgaaccacgcgtatgatgtggaagaaaaccgctcttttatcattgttcgtctaacctcgatttttttgacgattgccatggtatttacgattttagtggctttgcttctgccggtatttggccgggagattggaaggctcgcttctgactttgtcggcgcgtcggatctgtttttatccgtctgggccgccattcgctggggtgtcagcccgcttgtgcttttgattgttttttccgcgctgtatgtgattgcgccgaacaaaaagctgtctctccggtttgtcatgccgggtgcggtctttgcgactatcggctggatcattgtcagcacattgttttcattttacgtcagcacgtttgcgaactatagcgccacttacgggagcatcgggggaatcatcgttctgatgatttggttttacttgagcggcattttaattatcctaggcggagaaatcaacgctcttttacataaacgtaaaaagcttcctgatgaaaatccctaccattagcgcaccctataaacgaacttcggttcaaaaagaagtcggggggatatcgtgatgaccaagcatacgaaaaaaggcggaagccataacaaacaaaactcgaaaagcaaatcgagccataaaacaagcggaagcgccaacggacaaaacggctaccattagcataaaagcctcctgacatgatgtcgggaggctttttgattaagaagatgaagaataggtttcagccggtgaccagcttttcggtttgcccagcacaagggccagccacacagagctaagcgtgagagtaatgaagtagaacaagtttgcgctttcaaatgtctgcatataccagccgccggcaactgggccgaggatgctaccgagactgaatgtaatgccgcaaagcaggtttcccgccggcaggaggtgaggcggaagaaggtctgtcatatagctgatgccaagtgtaaaggttgatccgactgccattcctgcaataaaaaagcagccgccgatcacgtagggcgaaggaaatacaccggcgatgaaaaagcaaagagccccagtcagtaaaatcaccagcagcacattccgcctgccgtatttatcgctgaggatgccgagcggaaactgaaagataatgcttccaatcgcaaatgcgggaaggatgatcgctactgcgtctactgatatccccaaacggagcgcgtacaccggaaagcttccgttcagcgccgtttccagaaagccatagccaaatgtaggcataaaggcaacccacccaaacagcatggcctgataaaatcgcctgaaactattgtctgatttggtttcatgaggactggtttccgggtatgcattttgtagaaagaaaacaaaaagccacgcaaacagactgatgcagccggacacgataaaaggaagcgacggactcagcttgacaagcggcaccatgaacgggcctgcggcaaagccaaggccaaaggaaagcccataaatagacaggtttcttccgcgattttgttttgatgacatggaggtcacccacgtttgcgtagaaaagtgaagcatgtggtcgccgattccaatgaacaggcgaagcaggaaccagacccaaactgactgaagccaaataaatccgaataagcttaaaatgacaatgcttccgcccatgacgatcagcggcttgaacccgagctttctgagcggtgcttccataaacggcgaagccaaaagcacaccgatatacagcccggtcgcgtgcaggccgttgatagcagcggattctccatttgtttcaaaaatgattgaaatgacaggcagcagcatgccttgtgaaaacccggaaatggaaacgagcaagacaaggataaagaaatgaaatcgtgacatcgtgtcagttctccttatatggaatctatgttgatcgtacaacgttttccaaaagcaggcaacctgaaaaaagcctatatcacgctatacatttgccctcgtgtaatcatgaaggtttttgtgaagaataaaaataaaacaagtcataaaaaaggagctatttcaccatgaatcgtatcttttttattttagtggcggccggtgttccgctttctgtgattggcagtttgatgcattggccttccgcggttctatttgcagtttattgcgtgacgattatcgcgcttgcaagctatatggggagggcgacagaatcactgtccatcattgcaggaccgcgtatcggcggtttgttgaatgcaaccttcgggaatgcggtggagctgattatttccctttttgcattaaaagaaggcctgacaggaatcgtgcttgcctctttaaccggttcagtgctggggaacctgttgctggtagcgggcctatcgttttttgtcggcggtttaaaatataagcggcaggaatttaatatccatgatgcccgccataactccgggcttctgatttttgccatcattgtcgcctttgtgattccggaggtattctctgttggtatgggaaacgccagcaagctcaatttaagcatcggcatcagcatcattatgattctgttatatgtggcggcgctgtactttaaacttgtcacgcatcggggcgtttatcagccgaataatgccgctcagactgaagaagaggaagagccagaatggtcagggaaggttgcgacgattgtcttgtttgcggcaacgattgtggttgcatacatatccgaaaacctggtccatacctttcactcggtggctgaacagttcgggtggagcgagctgtttattggggtcatcatcgtggcgattgtaggaaatgcggcggagcatgcgtcagcgattattatggccttcaaaaataaaatggacattgctgttgaaattgcagtaggctctacgctgcagatcgctatgtttgtcgcaccggttctcgtcatctgttctatcttttttccgacaagcatgccgcttgtatttacattgcctgagctcgtcgcgatggtatcagcggttctcttgatgatcgcgatttcgaatgacggggattccaactggtttgaaggggcgacactgcttgctgcatatgtcattatggcgatcggctttttccttctttaacctgaaaaaatgatggataacaacaaagcgggatgaaaagactaagggaaaatgccatagaaagagtgatatgatgaaaaagctatttcattccacacttattgtgttgttattctttagttttttcggcgttcagcccatccacgcgaaaaagcagtttaaggttcctaattctgtcgcaagcatttcaaaggaaaacacgtatccgaatgcttcacaggatcagccaatgcttcagccgagcaagctggcaaaggaattgctcgatcattctgaggtaaagattgaaaatccgcatctcatcaaaatgctgaatgaatccaacatatccggcacaccgcttgcagtagggtaccgggcgacaatatttctcgggaaatgggcgctcggctatgaatcaaatgaaacagtcgcaaactgggaatataaaaaaatcaatacaaaccgtgcggataaccgcggcgggaaagaaacggctgaaatgcattatgcccaggaacagcagtacagagtgaagggcggcttgacagctaaagttccaaatgctgaagatgtcaaaagcatgatgatgcaaaaagcaatgaagaaaacgaacctcccgcttgcatttgagacggtcatcggggctggcacaaaacgggatcagatttataaagtcgctcctaaaaaaatcggttatctacatgcatatgcaccggctgtgaatgaaaaaggaaaagtgacttacggagaagtgtacttagtgctgaaaggaaataaacgaaaactcgtcgtgaaaaatgtcacgtcacagggaatcggcgcgtggattccggttcaagatcatgtcacgtttggctttcagctttcctcactgccaagataaataaaaaactgattccaactcggaatcagtttttttgtttattgggttctctcgattcggaccgcttcctcaagcatttgcacattgttttggtagagctggcgaacgagaacccgtcttactgcaaggctggcactgaaataatcatcatctttcaccatgcctttaaccgtaaattcgacgccgcgattgattttattcaatgcggtgatgccgtggatttgaaacggttctgtcggattgccgaattcatcccgcttcaatgaatcacgaagctcttcattcagcatgtcacatgcctcttccaacacgctgtacacgcggtccggatcttctttaaagctgataagaaaggattcggtaatccgcataaaatcaatattatagttctctatttgtctgacctcgccgttgctgatggtgagcagcttcccgctccattcccggatttgcagcgagcggaggccgatttcctccactgtcccgttgaacaagttgttgacggtgacataatcgcctttgtgcagctggcgttcatatattaagaatacaccagccagcacatctttgatcagcgattgggcgccaaaaccgatcacgatacctgctacgcccgccccggccaatatcttgccgaaatcatgcacaaataaagaaataacgtaaaagataaaaccaattgttgccgtatactgggtgacagaacggacaaggctttcaatcgttttttcctttttttcttcaataaagtccgtccgtttaaaaaatagctgtaccagccggttgatgataaagacaccgatccaaaggataacggcaacgaggagaatatcgacgattttattttgaaaaatctccgtaagtgtttctttcatccgcatctaactcctggcttgacgttttgtgaagtctgtatcctgataataactgtttttgacaagaacattcggtccgaggcaccggacattcgggcagtggcaactcagttctttcgcaagcttggtctctctccacttttcataggcggaagggaggctgtccgtctgaatgttgccaagcggcggggtatcaccgaaatcggtcacgataatgtttccgtcgaaaatgttcacattcaggcgggatcggccgtcagggtcatttcgcactgtgacgtttttcgccgcgcgaagccggcgaagcagcttttggtcgtcttcgtccggactgcaggcataaaacggcagcgttccgaacagcatccacgtattttcatcacgaatatccagcaagcggtgaatggcctgtctcatctctttcaggctgagggattcaagagcgcttgcgaaatcgcttggatacattgggtggacctcgtgacgctgacatttcatatcttctgtgatttggcggtgaatatgctcaatatgcggaagtgttcgtttgttcagcatcgtttccgcagataccattactccggcatccacgagcgtgcggctgttttcgatcattttttcaaaatagcgcgcgcgctgttcgaaggtcggttttctgtccatcatggcaaagccgatttcagcaaaatcttcaactgttccccagttatgtgaaatatgtagcacatcgagatacggaatgatccattcgtaccgctcgatgtcgagggtcagatttgaattaatttgtgtccgcacaccccgttcatgggcatatttcaataaaggaacaacatattcttttactgatttcaacgaaagcatcggctctccgcctgtgatgctgatggatctgaggcgcgggatttcctccagccgttttaacagaagatctattggcagagcattcgggtctttaggctgcaatgtatagcctacagcacaatgctcgcatctcatattgcacagtgtcgttgttgtgaattcaacgtttgtcagctgcatgtctccgtattggtcaacatccatataggcttcccaagggtcaaactcgggcgtaatcggacgcagcttcgtgttttgtgtcatgactatctaactcctttataaatgggcatactaacgctgccaacagttaattttagacctgatttgccaagatcgcaagtagcgcggcgattgaaaaacggcaaaaaatgagctaccataataaaaaatgaatggaggaacagaatggggaacgccgtaaacaataaagatcagcagattgattatttaaagaacagacttgacatgtttatgaacgtcatcgattcattagaccctgaagcaaccgacgttgaagatatagacaggcttatcagcatgcttgatgacctggaagccaaatacgaacgttttaaaaaagattgggaataaaaccgcgtgcccgccgcggtttttttattggcataaagcaacagtataaaacaaagtctctatctgtaaaataagaaaaaatgcagaaggagcgctggccatgaagtggatgtgttcaatatgctgcgccgccgtattgcttgccggaggtgcagcacaggcggaagcggtgccgaatgagccgattaattggggctttaaacgaagtgtcaatcatcagccgccagatgccgggaagcagctgaacagtttaattgaaaaatatgacgcgttttatttagggaatacaaaggaaaaaacgatttacttaacgtttgataacggatatgaaaatggctatacgccaaaagtgcttgatgtcttaaaaaaacatcgcgtaacaggaacgttttttgtcaccgggcatttcgtaaaggaccagcctcagctgatcaaacgaatgtcagatgagggccatattatcggcaatcattcctttcaccatccggatttaacgacaaaaacagctgatcagattcaggatgaacttgattcagtcaacgaagaggtttataaaattacgggaaagcaggacaacctgtatttgcgtccgccgcgcggcgtgttcagtgagtacgtactgaaagaaacgaaacgcctcggctatcaaaccgttttctggtcggtcgcttttgttgattggaaaatcaacaaccaaaagggaaagaaatatgcctacgatcatatgatcaagcaggcgcacccgggagccatttacctgcttcacaccgtatcgagggacaatgcagaagcgctggatgacgcgattacagatctgaaaaaacagggctacacttttaaaagcattgatgatctgatgtttgagaaagaaatgaggctgccgtctttgtaaaagagaaagacctctccttaaacggagaggcttttctttattttatacatttaatcagtgcggcccagtccagatccccgaagcctttctcaatcccgctttcaaaatggctcttggccagctcggcaagaggaagatttgcagaaacccgttttgcggcggcgagtgccaggttggtatccttcagccctaaagacattttgaagccggccggctcaaatttctgctcggccataatggttccgtaattttgatagactggagaaccaaagagcgcgctggcgatttctaaaaattgtttttgttctaagccgtatttctccatcattaaaaaggattcagataacgcctccagcatggacacaagcaagaaattaatgctgattttggctgcatttgccgtcttgctttcttcgccgacgtcaaatatctgctggctcaggctgtcgagcagaggcttggcagcttgctttgcttccgccggtccggctgttatgatacggagcgcggctttggctgcggcatccggtctgccaaggacaggagcggcgagaaaaaattgtcctttctctgcatgagccgctgcgagcttttctgagaactcaacactgattgtgctcatcgagatgtgtatgccgttctctgctaatccttcaagcagcccgtcttctccgaatgtcacggtgctgacagaatcatcatctgcaagcattgtgatgacaatatcagcggactttgccgccagccgcggcgtatcagctgcctgtgcgccttctgtgacaaggtcttctgtcttttgtttcgtccggttatagacagtcaattcgtagcctgcttgaagaacatttcgggcaatgggctgtcccatattgccgagtccgatgacagcaattttcaatctaatcactccctgaatattttttccattataaacaatatgaacagaatatgcatagcgatcggcttacaacaaaaaagaacagctgctcgctgtcctcatttaaaaatattgaaccatcctttatgtacaaaccaaatcagcattccaatcacaagcgcggccatcaggccaagtacagcgaaatatccgtatttccaatgcagctccggcataaagtcgaagttcataccgtatacaccggcaataaaggtgagcgggatgaaaatggttgatacgatcgtcagtgtcatcataatcgcattcatccggtttgagtttagcgtcacgtagctgtcacgcaagtcggacgtcatgtcacggttggattccacaatttcagacaactttaacaaatgatcatatatgtcgctgaaataggctttcgtttcccgctgctctttcacatggtcaaggcttaaaatccggtagagcaaatcacgcatcgggataatcgtccgtctcaaatgcaataggtctgttctgagatcaaacacctcgttcatcagcgttccatacgttttgtggggacggctttcttcaatttcattcagccggtcttcaattttatacacgagaggaaaatattcatcaacaagctgatccatgatcatataagaaatatgcccgggcccttttttcaatatgtccggtgaagcatacaaacgctcccggactttagcgataccgggcgtttcgtgtaaatgaaaggtgacgacaaatttttcgccttgaaagatatcgacttcctccgtctcaagtgtttccttattcagcgcatgaatcacgtaaaaacgatagccgtcataatggtcaagctttggccgctgcatatgctggaagcaatcctcaatggcaagcgggtgaaaatgaaaaaaatctctcaataacgccgtttccgtatcctccgggccgtaaaaatcaacccagtaccatgcaatatcaggctgttccactcgttcgatcggtatatttttcagcagctgatgctctgttgtgattgcggtaatgttgatcataaacaaccctccacctgccattatatcatgcggtctttatgagaaaagtatacggtactctctgcctaattccagcggcatgttatactgaacaaaaacggaaaaaagggtggatctcatgtggaaggaaaaagtatctgtcacgcctccgtatcattttgaccgcgtgctggacaggctgtctttagaccccctcaatgctgttgatcgagaggcgagggaagtccgtgtgccaatcagaaatcaagcgggggacgtatgtattgtaaaggtacaggcgttaggccatgcgggcgagcctgagttcctcgtcagcggggaaacggatcagggagaaatgatgaaggaaatcaagcggatttttcaatgggaaaatcatttgcagcacgttctggatcatttttcaaaaacgagcctgtccgccatttttgaagagcatgccgggacgccgcttgttctggactacagcgtgtacaactgcatgatgaaatgcattatccaccagcagcttaatctttccttcgcttacacgctaacagaacggtttgttcatgcgtttggcgagcagaaggatggcgtgtggtgctatccaaagccggaaacgattgcggaactcgattatcaggatctgcgtgatctgcaattcagcatgagaaaagcggaatacaccattgatacatcaaggatgatcgcagaaggcacactcagcttgtcagagctgccgcatatggcggatgaagacattatgaagaaactgatcaaaatcaggggtatcggcccgtggaccgtgcaaaacgtcctcatgttcggacttggccgtcccaatttattcccgcttgccgatatcggcctccagaatgccatcaaacgccactttcagctggacgataagccggcaaaggatgtcatgctggcgatgagcaaggagtgggagccttatttaagctatgcgtctttgtatttgtggaggagtatagaataattcgtctgacaatgaaggaaatcctgcaaacgtgttatactagaaagatgtgaaaaaaccatttcactttctgccatccgcagaaagcttcatatagaaacggagagaacaacgtgaaccaacaaaagaaacaggcgcccgtcgaactgaaggtcggacaaacttttccgctgacgattaagcgtctcggcattaacggagaaggtgttggctattttaagaaaaaagtcgtcttcgtgcccggcgcgcttcctggcgaagaagttgttgtgcaggccacaaaggtccagccgaagttttcggagggccgcattaagaaaatccgcaaggcatctgagcaccgggtggcaccgccttgccctgtttatgaacaatgcggcggctgtcagcttcagcaccttgcatacagccagcagcttcgggaaaaacgtgatatcgtcattcagtctcttgaacgccatacgaagtttaaagttgaaaacatggaaatcaaagaaacgattggcatggacaacccgtggaattaccgcaataaaagccaattccagatcgggcgctcgcaaagcggcagcatcatcgccggcttatacggccttgattctcatgatatcgtgccgattaaagactgtatcgttcagcatccggcaacgaacaaaacaacaggcatcgtccgccgcattttagaggacttcaatgtgtctgtttataatgaaagaaaacgaaaaggcgacgttcgcacgatcgtgacgagagtcggctttgaaacaggcgaagtgcaggtcgtgcttgtaaccgcaaaagaaacgcttccgcacaaggaagaaatcgtcaaagcgattcaaaagcgattgccagaggtcaaatccattattcagaatgtaaacggggcgaaaacctcagtgatttttggtgagaaaacaaaacagctcgccggaaaaacagtgattcaagaagtgctcggcgacgtatcttttgaattgagcgcccgcgctttcttccagctcaatccggaacagaccgtcaagctgtatgatgaagtgaaaaaagcggcgcagctgaccggaaaagaaaaagtcgttgatgcgtattgcggcgtcggcactatcggcatgtgggttgcggacggagcgaaggaagtccgcggcatggacgtcatcaaggaatcaattgacgatgctaagaaaaacgccaaaaaacacggcatggcaaatgccacatacgtaacaggaacagccgagcactggctcccgaaatggacgaaagaaggcttccgcccggacgtcgtcattgtagacccgccaagaacgggctgtgacagcacgttcttggacacgatcaaaaaagtcaaaccgaaacgctttgtctacgtttcctgcaatccatccacgcttgcgaaagatttgcagacgctgtcgaaggactatcgcgtggactatattcagcctgtcgatatgtttccgcagacggcgcatgttgaagcagtggcgaggcttgtattaaaatcgtctaactaaaaagaacatttcccagtcataaaatagttttcctaataagacctggatttcggtaaaataaacaattccgatttccgggtctttttcgtgcgcagctcttgtcctaacggtctgttctcaattttatcttccttcttttcgcggagatctttattttaactggcgaaaagaattgaaaaaacgtgttgaaaagcaggtgaaaaaaagcgttatttaaccggaaaaatatcctcccagtatgtttaaaatacatgagtagaatgatgtaaaatcatagatgtattttcataatttgtaaaattatatattgacttgcagttattacgtgtgaaatattgatgataggaatataaggaaagtatggcgtatatcatttcaagagtcattcgatgtaaaaagttgaaacattgtaataaatgaaagaggtgaaaatgatggccaaccccattttaaaatgcataacgtatgagcactacaacaattaaataatagtgccgagacgataacaactattacagtaatacctacaatggttatatccttgcgacaatcatgcttcataatataatgattttagattgacacttggctaaaaagtattgcagagaaggaaatggataattaaatggataaagtatataaaagaagttggtttcaaacatttttggcatttttagtatctcagctttattttaattttgtagaattaacgggatggggtcctaagtatagagaaatgaatggattcccagcaaacatagttgaactagatttctttcaaacatatctttcattctatgataatccatggtttaatattattactgttttcttgggagttttcactattatacaaataattacagggataacaaaggatattcgaaattaaagcaataacttctgatgccttatttaatgatgaaagaaaatgtacactttcttaattatcttatgagtgaagactgcgacacttagtcagcagtctattttatggttctggatcaggattaccgaattataaccctatacaaatatatagtaggttgccacttgctgcgttggttattttctaaatcatgagcaaatcccaaatgattcagattgaagttcttgaattcttttaaataagggtttattttctcttctcatcctctttactccatgtgattcacaagtggtagcagcttaagtaggttttttcattctcttgagtactcagttataccacccccaactcaatttgctttatctctattagtttttccgcaaatatgatatagagatacggatatggtgtagtgttaaatatcttatcttcaataacagggcaattattttgcgttggtaatatggagaactcatatgatattctatttaggttggaatcctttttatccaaaaagttcaaaagcaaggccactaagaaagacgaaggtcagcgccagttaaccagaatataaaaaatagggtagataatcatcccacgtgaaatcttcaaaatttactatagattgataagaaatgctttcgcatgcgataagtgtaaaagaagcatggtcagtttttaatttgggataaaggttcagccgtatcccataatgaaaggatttgatttttgttatgacagaaaatttctggcgtgaattaccacggccgttttttgtactggcaccaatggaagatgtgacagatgttgttttccggcatgtagtaagtgaagcaggcagaccggatgtgttttttacagagttcacaaactcagagagctattgccacccggatgggaaggatagcgtgcgcggccgtttgacttttacagaggatgaacagccaattgtggcccatatatggggagataagcctgaaaacttccgtaaaatgagtattggcatggcagagttaggatttaaaggactagatatcaatatgggctgccctgtgcctaatgtggcggggaatggaaagggaagcggccttatttgccgtcctgcagttgcggcagaattaatacaagctgcaaaagcagggggattgcctgtaagcgtgaagacaagacttggatacacggatgtggatgaatggcgcgagtggctgacacacattttgaaacaggatattgcgaatctttctattcatctgcgtacaagggcagaaatgagcaaagtagatgcgcattgggagctcatcccagagattaagaaacttcgtgacgaggtggcaccagatacattgctaacaataaacggggatattcctgaccgtcaaactggcttgaaacttgctgaacaatacggcgtcgatggaattatgatagggcgcggtatttttacaaatcctttcgcttttgaaaaggagccgaaagagcatagcagcaaggaattgcttgatctcttaaggctgcatctggatctccatgatgaatattcaaaagaagaagcccgtccatacaagcctcttcctcgctttttcaagatttatctccgcggattccgaggggcaagtgaattaagaaatcaatgcatgaacacaaagtcaacagatgaagtgcgtgcattgctcgacgactttgagagaaagtatcttgatgggatagagtaacagcagtgcttgattcaaaaaaggctaacaaaataaagggatttttacacaattcttgactaaaataaacctggattttcggtaaatccgggtcttttttgtacgcagcttttactcagcctgtcttttctctaatttattgtaagaaaataatggtatatttagtggagatatcatataaagggggagaggaaaatgaaacggctatgcatcatcccctgcggcaagaaaaaaatctgggatgtccagcctgatgccgggccggtaagagcagaggacgcttatctcagcccgtttcatcaggcgtgcgagcggtatgcaaaaacatttttcgatgagtgggtgattttgtcggcgaagcacgggttcctccgccctgatgatctcgtttcgggaaattacgatgtcacttttggcaccggtcatccggaaatcatgacagcggacgagctgcgccgtcaatttcacgaaaaaggcttttctgatatcgaagagctagtcatgcttggcggaaaaaaatatcgaagcgttctaaacgccgtcatcggagaacaccagcatatcagctggccgctatcatcatacaaaggcataggctatatgctccaagcgctgaaccgggctgttgaagaaaagcatgaactgtagcacgtacatatgaggaaaagagtgggaacatgaaaaaacttgtgtttggcttgcttgccattgtgttattcggatgcggactatatatctatcatgtatggttcggtgatccattttcgaaaaatgctgcagaacagaagctagtgtcttatgtgaaacaaacctatcctaagaaagaaatcaagatcacgaatggggtatataacgctaaaacgtctgaatatgtatttgaagcaacctcccaatctcatcgctacccaatgtgtacgaagggatttctgcatcctaaagtaacgtgcgatggaattgaagaagcgtataccgaatcagtagcaaaacatgtaaatgaagaagcaacgaaggcaatcgaagcagatctgaaaaaagcggttcctcgatttataaaagctgatgctgctttgagtatcgaaaacggacagttcacgttagatacaaaatggaacaaaaagctggctgaaaaagcgcctatgagcatgacgattcagttagacgccagcgggttatcaaaaacagatgccgcaaagatggcggaaacggtcagaaaaacgcttaatgaaaagggatatacatactcaaacggcacgatagactgtatgcagaaggacggggacggcggtattggatatgtcaaatattcaattgattttctttcaaaagcagctattcagtcaaacgatgcagaggaactaggaagttaaaaagatttccaaggaaataaatacgtcgatcattgtcaaaggccgggtgatatccggtcttttttttgcatgctgtaaaacgagacaaatgaatcagtttgagacaaaacgagacacacgtctcaaactgtctccaaagtgaagatgagaagactgattttacgggctcaaaagactggcacacttcttgcatttataatggtgaaccctaaatagaaggaggcgcacaaaatgaaattgttaaaacgagaaggcttgtcattaactgaggaaaaagcgctgtggatgtaccaaaagatgctggagatcaggggctttgaagacaaagtgcatgaactgttcgcccagggagtgcttcccggattcgttcatttatatgccggtgaggaagccgtggctgtaggggtgtgcgctcatttacatgatggcgacagcattacaagcacccacaggggacatggacattgtatcgccaaaggctgtgacctggacggcatgatggcggaaattttcgggaaagcgaccggattgtgcaaaggcaagggcggttctatgcacattgcggatcttgataaaggcatgttaggcgcaaatggaatcgtcgggggcggctttacgctcgcatgcggatcagcgctcacggctaaatataaacagactaaaaatgtaagcgtttgctttttcggggacggggcaaataaccaaggtaccttccacgaagggctgaatttagcggctgtatggaaccttcctgtcgtatttgttgctgaaaacaacggctatggcgaagctaccccatttgagtacgcatcagcctgtgattcaatcgccgatcgggcggctgcttataacatgccgggggttacagttgacggcaaagatattttagcagtttaccaggcagccgaggaagcgatagaaagagcaagaaacggcggcggcccgtctttgattgaatgtatgacctacagaaactacggccatttcgaaggagatgcccaaacctataaaacgaaggatgaaagagttgagcaccttgaagaaaaagatgccattcaaggttttaaaaactaccttttaaaagaaacagatgctaataagctgtcagacattgaacagcgtgtcagcgaatcgattgaaaaagccgtctcgttcagcgaagacagcccatatccaaaagattcggagctgctgacagatgtgtatgtgtcatatgaaaaaggaggaatgtaagagatggcgagagtcataagcatgtcagacgcgatcaatgaagcaatgaagcttgcgatgagaaaagacgaaaatgtgcttttgatcggtgaggatgtcgccgggggagcggcggtcgatcatttgcaggatgatgaagcatggggcggtgtattaggggtcacaaagggactcgtacaggaattcgggcgtacaagagtgctggacactccgatttctgaggcaggctatatgggagcggctatggctgcggcatcaaccggtttgagaccgattgccgagctgatgtttaacgattttatcggcacgtgctttgatcaggtgatcaaccaaggggcgaaattccgttatatgttcggcggaaaagcgcaagtgccgattaccgtccgcaccacatacggagcagggttccgggccgctgcccagcattcacaatcgctgtatggccttttcacgagcatccctggactgaagacagttgttccatccaatccgtatgatgccaaaggtcttttgcttgcagcaatagaagataatgatccggtgtttttctttgaagacaaaacgtcctacaacatgaagggcgaggtgccggaagattattatacaattcccctcggaaaagcggatatcaaacgcgaaggcaatgatgttacgctctttgcagtcggcaagcaggtcaatactgcgcttgaagcggctgcacagctttcagagaggggcatcgaagccgaggtccttgatccccgcagtctgtctcctctggatgaggatgcgattttcacatcgttagaaaaaacaaaccggctgatcatcattgatgaagccaatccgcgatgcagcattgccacggatattgctgcgcttgtcgctgacaagggctttgatttgcttgatgcgccgattaaacggattacagcgccgcatacaccggttccgttttcaccagtgcttgaagatcaatatttgccgacaccagataaaattgtcagcgtcacgcttgaattgcttggcgagccggcattgaattaaaggggggacacaaatggcggtaaaagtagtgatgccaaaattgggaatggccatgaaacaaggggaagtatcgatatggaataaaaaagtaggcgacccggttgaaaagggagaaagcattgccagcattcaatcggagaaaattgaaatggagatcgaagcgcctgaaaaaggaacgctgatcgatatcaaagtgaaagagggagaagaggttccgcccggcacagctatctgctatatcggggacgccaatgagtcggtgcaggaagaggcgggggcgcctgttgctgaagacaatatgccgcaagccgtccagcccgtcaaacaagaaaacaaacccgcagcctccaaaaaagatcgaatgaaaatatctccagtcgccaggaaaatagcagaaaaagcaggattagacctaaaacaactgaaaggaactggaccaggcggacgaatcgtgaaggatgacgtaacaaaggctcttgctgaacagaaaaaagatcaagcaaagcctgtttcggagcagaaagcgcaggaaatcccggtgacaggcatgagaaaggtcatcgctgcccgaatgcaggaaagcctggcaaacagcgcgcagctgacgatcacgatgaaagctgatatcaccaagcttgccactcttcaaaaacagctttcaccaactgcggaagagagatacggcacaaaactgacgatcactcattttgtctcaagagccgccgttctcgctctgcaagctcaccctgtgctgaacagcttttatcaaaatgagcgcatcatcacacatccccatgtgcaccttggtatggctgtagccttggaaaatggcttagtggtgcctgtcatccgccatgctgaaaagctatcgctgattgaactggctcaatccatctcagaaaatgccaaaaaagcacgcgagggacgtgcgggaagcgaagaactgcaaggatctactttctccattacaaaccttggcgcgtttggagttgagcatttcacaccgatactaaatccgccggaaacaggcattctcggcatcggagcaagctatgacacaccggtgtatcaaggggaggagatcgtcagaagcacgatcctgccactcagcctgacatttgatcacagagcgtgtgacggcgcccctgccgctgcattcctgaaggcgatgaaaacatatttggaagaacccgcagcattaattttataggaaaagcaggtgaaaacgacatgacattagccattatcggcggcggacctgcaggctatgcggctgcggtttccgcggcacagcagggcagaaacgtgctgctcattgacaaaggcaagcttgggggacctgcctgaatgaaggctgcatcccgacaaagtctttgttagaaagcgcaaacgttcttgataaaatcaagcatgccgacagctttggaatcgaacttccggcaggtgcgatatcagtcgattggagtaaaatgcaaagccgaaaacaacaggttgtcagtcagcttgtccaaggcgttcagtacctaatgaagaaaaatcaaatacaggttgtaaagggaacagcctcctttctttctgaaagaaagctcttgatcgaaggagaaaacggaaaagaaatcagagaggcggaccaagtattgattgcctccgggtcagagccaatcgagctgccttttgccccatttgacggcgaatggatcctcgacagcaaagacgcgctttctctttccgagattccgtcttcactagtcattgtcggcggcggtgtcatcgggtgtgagtatgcagggctgttcgccagattgggatcgcaggtgaccatcattgaaacagcggaccggctgatcccggctgaagatgaagatattgcccgtctctttcaggagaaacttgaggaagacggtgtcgaagtgcatacttcatccagattagggcgggtggatcaaacggccaaaacggcaatatggaaaagcggtcagcgagagtttaaaacgaaggccgattatgtgctggtggcgatcggcagaaaaccccgtcttgacggattgcagctggaacaggccggagttgatttttctccaaagggcattccggtgaatgggcacatgcagacgaacgtgcctcatatttacgcgtgcggagatgctatagggggcattcagctcgcgcatgccgctttccatgagggcatcatcgctgcttctcatgcttccggaagggatgtcaaaatcaatgagaaacatgtgccgcgctgcatctatacgtccccggaaatcgcgtgtatcggaatgacagaacgacaggcaagaagcatatacggggatgtgaagatcggcgaattttcattttccgcaaacggcaaggcgctcattaaacagcaagcggaaggaaaggtcaaaatcatggctgaaccggaattcggcgaaatcgtgggtgtctcgatgattggcccggatgtaaccgagctcatcggccaagcggcagcgatcatgaatggtgagatgacggcagatatggcggagcattttatcgccgcccatccgactttatcggaaacattgcatgaggcgctgttaagcacgatcggccttgcggtacatgcataataaaggaaaaagcaggcgcatggatataaggcgcctgcttttttattgttgaaagcgctttatttttcccctacaatagatgaaaacggcgtgtaagggaggagcgatcaaggaaatgaattcggtcccaaacgatttgcaaacctggaaacgttttgtgaaagacggtgtgcttgacgaagcccgattaagaaaacggattgcagagtcatggcatcgctgcaaaaaagctgaggtcaatccttatttagaaaaaggcccgaaggttttacagcaaacggagctggatcagcagtcaaaaaaacattcattcttcttgacgaccgcaaagccttacctcgaaaaactgctgcctgccataaaagaaatggaaatgatggcgctgttaattgattcagacggtgttgttctggcattggacggccatccgcgcgcgctctatgaagccaaacgcatcaatttcgtcgaaggggcatgctggacagaaacggctgtcggaacaaatgcgattggcacggcgctccacatcagcgagccggttgcaatacaaggatcagagcattactctatcgcttcccatctttggaactgttcagctgctccgattcaccatgaggatggcagccttgcgggtgtaattgacatatcatgcccggcggcaggcgcgcatcctcatatgcttggtattgccacggcgattgcctatgccgctgaacgggaactcgcagctaaaagccgtgagaaagagctggagctgatcagccgttttggggagagagctgcatccagtgtgccgatggtgctctgtaataccaagcagcacatcatcagtgcgagcatgccgattcgaacctcaatgccggattggcagggccggcacctgtacgagttgaaggaacggggctattcaatcgaaaatgctgtcaccataggagatggcggcacttgtttttatctttcggaacaaaagaaaaagaaggcgtttcgattcaatggagtgatcgggcaaagcggccgatcgcaagcgatgctgatgcaccttgaacgagcagctgcgacggatgcatcggtctgtttgtcgggtgaaacgggtacggggaaggaggtcgcggctcgcgcgcttcatgagaacagtgagagacggcacggtccgtttgttgctgtcaattgcggagcgattccgtctgatttgattgaaagcgaactgttcggatatgcagagggcgcttttacgggagcgaaacgaaatggctataaaggcgcctttcaaaaagcgaatcaaggcacattatttttagatgaaatcggagaaatttcccactcgatgcaggttgcacttttacgggtgcttcaggaacgcaagataacgccaatcggcgggacgaaagaaattccggttgatatcagagttattgccgccacacattgtgatttacgcgagcttgccgaaaacggaaaaatcagagaggacttgttttaccgtcttcatgtctatccaattgaactccctccattacgcgatcgcaccgaggatatcccggatctctttgagtactacaaacagaagaatcattggccaggcgatcttccttctgatttttgtaatgtgctgaagcaatggaagtggccggggaatatccgcgagctgtttaatgtgtttgaacgtctttctatcagatttccggacggccggctgagagatgaatcgcttcccgctttactggaagccgctggattgccggccagctctgcagaaaaaaagccggctgctgccggcgtgcttacttttcgtgagcaaatccaaaaggatatgatgatcaaagcgcttgaatctgcaaaaggaaacgtctctcaagccgcaaaaatcagcgggatcccccgaagcactttctacaaacgcctgaaaaaattcaacttgtccgctgaatcataaagcatacttccttcaggaaatggaaacgttatgtattgaaggagggtgttacgatgaatattcaaagggcgaaagaaattgtagaatctcccgacatgaagaaagtaacatataacggcgttcctatttacattcagcacgtaaatgaagaaactggaacagcaagaatttatccgcttgacgaaccgcaagaggagcatgaagtgcagctgaacagcttaaaagaggattaaacaaaaatggcccgcttcataagcaggccattttgttatccgcgcggcgcaaataaaataacacagacaccgatgagacaaatgaatgcgccgatccagtcatacagatcaggtgttttccggtcaacaagccatccccacaggaccgcaagcacgatgaatactccgccataagcggcgtatacacggccgaaagatgggaaggactgaaacgtcggaagaatgccgtatacaatgaggatcagcgccccggcgattccgtagccagctggctttgcctctctcagccatagccaaaccagatatccgccgccaatttcagcaagccctgccgcgagaaataaaagaatggtaatcagcatcatgagcactcctcaatttgcatttatctttcattatagaggaggagagcttttaaagcttcggatgattctcaaattccttcaaatacgcttttcgctgaacctctgtaaattggctgatccaattgttttgagcctcttcattcaaatggggaaggatatagcgttcaaccgcttcgaaaaacagcggattcgtgatgatgttccaggtcgggattcgaacgattttgccgtctgttttctcgatgataatatcctcaaaaaagatccctttcaaactgtattgatggcgtcccatataaagccgcttcacctcggaaaacagcacgctgcgctttctcaagaagatttcgccactaggtccggtctttatggtgaaaatgacatttccacggcttgtgaacgcaggaaaagccataaagaatgtgatcaatccataaatcatcgccagtaatccgccgcccaaataaagcagggcatatttagattcaaacgtgagggcttcagacaccagccagactcccacaataaaggcgccccctgtagcgaggaacagccaagcccttagaaacatcatgctttttacttcaatcatgtgctgcccctaaagcttcggatgattctcaaattccttcaaatacgcactgcgttggatgtctgtaaactgtccgatccaattgcttttcgcctcttcattcagatgtggaaggatatagcgttcaaccgcttcgaaaaacaacggattcggaatgatgttccaagtgggaatgcgaatggtcttctgatccacggtttggatcaatatatcttcttggaagattccttttagactaaatttatggcggctcatctcaattttcttgatatcagtaaacgtaacagacactttgtcagtgaacacttctccattttttcctgtcttgatgcggaaaatggtatttccccgcggggtgaaagccggaaagaagatgataaataaatataaacaaaacaaggtgaacagaaagccagcaggaatggctaataggtaatatttcgtttgaaacgtaatacccatataaaagagccacaaacatgctaatcccataccggcagatccgacaaaagcccatattctcaggaacattttgcttttgacttcaatgatttcttggtttttcaatgcttttctccttttgttaattcaattcttatcattttgaaatgatttgatttacaacatccttatgagcagggaggatagaaaattcattctgggtgatgcctgtgacaagccaagtatggtgggcccccggcaggacgaatgccatgtcagccacttcaggagtgttatcttttccatatgccagacgcataagtgtatccattttccctttccgcaaagccagatcatttgcaaatcgggtaacgtcctcttggtggtcatgtttttcaaggaactcttttagatatgaagggttgtctgaagcgccctccaagagtttttcaaattcatttgatgtcaatgttacaatcgattctcttttatcctctgtatctattatatgtaaaaactcatctgtcttagcaagtaacccttcacttgattccatttttgtaatgcgatggacttgttcatcaaaaaggagttcgtgagagtaggtgccgaattttgatacatggcatgacacattctgttcggcaccttgcccgttaaatttagaaagcttcactgtatagtcagcgtcgtttaatacatggataaacggacagtactcgtcctttaaccgatattgatggttccgatattccgctgcatccttggctaagagtgagcggcacgcggcttcaaataaggcgccgagctgttcatcttctatttccggaaaataggcctgcttcaaggccattccctgttcaaaaaacccttcgctgtaaaagcaaaacaagagttcttctatgctaattgtaaactgcttcattgtttattctcctatccaaatgaaaatttccctttaaggaaatgggttgcgccgtgtataagcgaatccgctgttttctttgctttttccattccttttttcgcgctgtctatccctttatgtatcgatttattcgccgcatctatgccgtcattcactgatttgacgactttgccggctgattccagcccttttttggctgtatcaacaacagcatggatcggttctttcagctttaaggctgctttttcagcaaaaccggctgtatatttggcgatttgttctccgacgactccgccaatgtatgaacctgctgccccaagaaggacagtacccacaggtcctgcaaagcttccgattgcaccgccgatgacagcaccagctgtggcaccgccggcaacaaaaatcgtattattcacagcattcccgacggccttggcgttttcacgcttgagaacttccggtttatcctggtattttgcataattttcagcaattttcacgcctgctccgaatgtttcggtcgctccggtaatcagtgtggcggtaatggcatttcctttcgcgaatctcaagcccgtttttcccacatccttcaaagtggagcgtacgccggcttcattaagaaatccttttgtgtagcttctgacgctgtttgaaaaatccaccgtgtcctgaggaaagtattttgtaaactttttatgtaccaaatctgaaaatggacggtttgtctttttcaacaaatatttaggattcaaaagcactcttgccgctttttgataacgtgagctgtcaacggccctggaaatatccaagagcagttttgagtgctgggctgtatgcaagccgcttggttgtttcacaaatttcgtaagccctaatccgtaatattttccctgcgtcagcataagagcggttaagcttgtcatcgtaccgtatttgtcgtaggcattgtagagctttcgcaaaatatcatcttgttccacaaatttatcgcctgtttttctgatgaaaatctcattgtcactcagcttagtgacgagcgcctttcctgagctccacgcatcgcccactccagaaaaacagctgctgtagcggggatcgcattgcaaaatcatctgccccagctccacatgcaggtccttatatttgttttccatatcagttaattcagtgactacatcatttgcaagctgttcgagcttatccggatcaactgcaatgtttcctgacacaccgttcacctcccgagtttatgtctttcctctcttgctttacgctccagttcttccattctggcaatttcagcttttcgttcttctattttgacagcggcagccttcagctcttggcttgtttcaagcagctcctgttcgaattgatcgtaggcggctttcgtttcctcgaaatcctggtcaaacgaatctcttgctttgccctgccaagcatctcccaatgcagataaccgggattcaagcagcattttggagcttctgacctcttctgcggccgcactatacttgtttgccagctcaatgactttatatgagtccaacttttgtcccctgccttttctaaattcacgcacaattggatgttttatataaatgattataaataattcggcatgtatccgaatcgtacaaaagaaccttttcataagaattggaagggcgtatattcacttaaaattcacagttggtgagactttaagattacaaaaaaggtaaaaaaaccaaatctctcagacataaggcaaatgagaaatttcccgctctatgggaaaaaacactaaagttgatcaaatgacctaagtgcgccaaacgtgttacgggacgagctatctcatggtataaatggaattgtaaacgttatcaaggaggtcgtcatatgaagaaaaaatcattctcaatcgtaatagcgggcggagggagcactttcactccagggatcgtactcatgctcttggaccatttggaggagtttccgatcagaaagctgaagctgtatgataatgataaggagagacaggatcgaattgcaggcgcctgtgacgtttttatcagagaaaaagcgccggatattgaatttgcagcgacgactgacccggaagaagcttttacagatgtcgattttgttatggcgcacatcagagtagggaaatacgcgatgcgcgcgcttgatgagcaaattccgttaaagtacggagttgtcggccaggagacgtgcgggccgggcgggatcgcatacggtatgcgttcgatcggcggtgtgcttgaaatattagattacatggaaaaatactcgcctgatgcgtggatgctcaattattccaatccggcggcaattgtggctgaagctacgagacgccttagaccgaattctaaaattctcaatatctgtgatatgccggttgggatcgaagaccggatggcgcaaattcttggcttatcctcaagaaaagaaatgaaggtccgctattacggattgaatcatttcggctggtggacatcgattcaggatcaagagggcaacgatttaatgccgaagctgaaggaacatgtatcccaatacggttatattccgaaaacagaggctgaagctgtggaggcaagctggaatgacacgttcgccaaagcgcgtgacgtgcaggctgcagatcctgacacactgccgaatacgtatttgcaatattatttgttcccagatgatatggtgaaaaaatcaaatccgaatcatacgcgggcgaatgaagtcatggaagggcgcgaagcttttattttcagccaatgtgacatgatcacacgtgaacagtcctcggaaaacagcgaaattaaaatcgatgaccacgcatcgtatatcgttgatcttgcccgggcgattgcctacaacacaggtgaaagaatgctgttgattgttgaaaataacggtgcaattgcgaactttgacccgactgcgatggttgaggtgccatgcatcgtcggctcaaatggacctgaaccgattaccgttggcaccattccgcaattccagaaagggctcatggagcagcaggtatccgttgagaagctgactgttgaagcgtgggcagagaaatcgttccaaaagctgtggcaggcgctgatcctgtcaaaaacagtgccgaacgcgcgtgtggcaagactcattcttgaggatttagtggaggccaacaaagacttctggcctgagcttgatcaaagcccaacccgcatatcataaatgaaattcccccattttcgaatctgtaattgtatataatagaaagaaaatggggggatctgatatgcagctcgaagaactgatcaatcagcactacagcaaattgaatgacaacgattttcatattttaaaatatatattgaatcataagcacacatgctatcaccttggaatcgacgcgctggccaaagcttgcagtgtatcgcgttcctcaattttacggcttgcccaaaagctcggtttcagcggttacagtgaatttcgcgtctttttaaagtgggaagatcagccggaagaaggcgagagtatgagttttgaaaagctgcttgatgatattgaagcaaatttgaagtttttacggacaaaggacatgacggacatgtgccagctgattgatgcagctgaccgcattttcgtctacggttctggaaatgcgcaaaagatatgcgcccgcgacctgcaaagaatgtttattccgcgccatcgctatcttattttgattgaagacacaaatgaatttaatttgatgcgcgatgattttaaagtgaacgatctgtttatcatcatttctctttccggagaaacaccggagctgattcctcaggcaagaatgctttctgcaaagggtattccctttatttccattacgaatttaaaaaacaatgtcctcgcccagctgactccgcataatctttatgcgacaagcaaacctgtgacattaagcgatagaacggaaattgtcgcttttgcaccgttttttctcgttggcgaagcattgttccgcgcatatgttgattacaaagaggcagaaaaaaatgacaatgagtagcagggggttctggtatgatgcaaaaaattcagcgctttggaagcgcgatgtttgtgcctgttttattattcgcgttcgccggcattatcgtcggtatcagcacgctctttaaaaataaaaccctcatgggaccgctcgccgatcctgacggtttttggtatcagtgctggtatatcattgagcagggcggctggactgtttttaaccaaatgccgctcttattcgccattggcatcccggttgctttggcgaagaaagctcaggcacgcgcctgtttggaagcgcttactgtctacctgacattcaactattttgtcagcgcgatattgacggtatggggaggagcatttggcgtcgacatgaatcaagaggtcggcggaacgagcgggttaacgatgattgcgggcataaaaacgctcgataccaacatcatcggagccatctttatttcttcgattgtcgtctttttgcataatcgctattttgataaaaaactgcccgattttctcggcatctttcaaggctcaacatatatcgtgatgatttccttctttattatgatcccaattgcgttggctgtgtcttatatttggccgatggttcaatcgggaatcggctcgcttcaaagcttcctggttgcttctggggcggtgggcgtttggatatacacgtttttggaacggattttaattccgaccggccttcatcactttatttacacgccgtttatttatggcccggctgtagcggaaggcgggatcgtcacgtattgggcacagcatctcggcgaatattcgcaaagcgccaaaccgctgaaggagctctttccgcaaggcggattcgcgcttcacggcaactcgaaaatcttcggtattccgggtatcgccctggctttttatgtgacagccaaaaaggaaaagaaaaaactcgtcgcagggctgctgattcctgtcacactgacagcgattgtcgccggtattacagagccgattgagtttacgttcttattcatttcacctttcttatttgcggttcacgccgtgcttgccgccacaatgtcgacagttatgtatatggccggcgtcgtcggaaatatgggaggcggactgattgaggcggtaaccttgaactggattccgctctttggcagccacggtatgacatatgtgtatcaaattttgatcgggctctcgtttacagcaatttattttttcgtcttcagatttttaatcctcaaattcaatatcgctacaccaggacgggaaaaggatgaacagcaggaaacaaagctatattcgaaaaaggaatacagagaacgaaaaaacaaggatgaaacggcctccgctgctgaaacggctgatgacaccgcttttctgtatattgaagcgctgggcggaaaagacaacatcactgaagtcacaaactgcgccacccgcctcagagtcagtgtcaaggatgaaacaaaggttgaacccgacagcgtattccgcgcgcttggcgcacacggcgttgtcaggaacgggaaggcgtttcaggtaattatcggattaagcgtgccgcagatgcgggagcgtgtggaaaaaatattgaatcaataaagactgccctccttttcgggagggttttcgtttgccgtcaaaaagaccgccatagtaaagtaaagaaagagacaatcgagtaaaaaggggtttggaggcttttacatgcaaaaggctttgtcgtttttaaaaccatattcattgctggcgggaattgctctgattcttatgctgacggagcttgcagttgaactgatgcagcctttattgattgcaaaaatcatcgacgatgggatattgaagcaagatctgcggcatgtatggatatggggcacggtcatgatcgggctgaccgtgttatcctttgcggcggggatgctgaattccttttatgccgcccatgtcagccaaagcttttcctatgatacgagaaaagggctttttcaaaaaatccagtccttctcctattccacatttggacagttttcgtcctcttcttatattacaaggctgacaaacgacgtcacacaggttcaaaatatgatttttatgagtttgcggtttatgctgcgggctcccttaatgattgcaggcggcattgtgctgtcgcttgccgttaatgtgaaactcgggttttttctgcttgtgaccattccgatcctgatcttgtttttgctatgggtattaaggaaaggcggggcactgttccgctcagtgcagaaaaggctggatcaagtgaacaccatcatgcaggaaaatttaattgcaatcaagctgatcaaagcgctgcttcgcggcagccacgaagtcaaacgatttatcaaagccaacacaaggctgatggaaaaaacggtttcggcctttcagcttgtggaattcacgatgcctgtactgatgctgctgatgaatctctgcatccttttgattttgtgggcggggtcctacagtattacgagcggaagcactcaggttggcgatgttgttgcgataattaactacgcaacacgaattacaggcgcgctttcgatgtttccgtttttgattatgattttcacccgggcgaaggcttcaggggatagaatcggtgaggtgcttgaaacagaaggcgacgagcgggaggaaggcaccatatctgatcgtttgtcaggacggattgagtttcagcatgtatcctttcgctatcctgaaatggacagagaagcgctcaggaatgtctcattttccgcaaagccaagagaaacgatcgcgattctcggtgcgacgggctcgggcaagtccacgctttttcagctcattccgcggctttatcagccggattcaggccgcatttacatagatgaaaagccggttcaagatattccggctgaagggctgcgcaggcaaattggatatgtaccgcaggaagtcctcttgttttccggcacaatcaaagaaaacatcgcttggggcaaagaaaatgcttcactagatgaaataatggatgcggcaaaacttgcgcaaattcatgaaacgattttaaagctcccaaatggatatgacactgttttggggcaaagaggcgtcaacctgtccggcggccaaaagcagcggatttccattgcgcgggcgctgattcgaaaaccggctatccttctattagatgacagcacaagcgcgcttgatctgcaaacggaggcgaagctgcttgaagcaatcagcacataccattgcacaactttgatcattacacaaaaaataaccacggcgatgaaagctgatcagattttgctgcttgaggacggcgaactgattgaaaaaggcactcacagtgagctgctttctgaatctcagttatacaagcgcatttacgagtcacaattcggaagggaggggagcgagtcatgctaaaagacatccgcaagcctttccaatatcccaaactgccaattgacaaaaaagaaggcgcgaaaaagcgggcgaaagcaaaggatacaaagggcacactgagacgaatctggtcttacttggctgaaagaaaaggactgctcatacttgtcatgctaatggttgtcatcagcgccatattcggactccttggtccctttgtgatcggaaaggccatcgaccattttatcgtcgggaaaacggtcagcggcttgattcctgttttgcttcttctgctcgctatctatatcattcagtccctgtcgctttggtttcaaaactattggatgattacgatctcgcagggcacggttttcagaatgagaagcgaattgttcacccatctgcatgagctgccgattccattttttgataaacagcggcacggcgagctgatgagccgggtgacgaatgacatcgaaaatgtcagttctaccttaaacacgtcagtcattcaaattttgtcaagtgtgatcacctttgtcgggacgattgcggtgatgctgtacatgagcccgctccttactttgattacgctgaccattattccggtgatggcagcgagcctgaaatggatcaccaaccgaacgggaaagctgtttaaagaacagcagaaaaaccttggtgatctgaatgggtatattgaggaatctgtttcaggcgcaaaggtcatcaaagcatattcacgtgagaagcagattactgctgaattcctcgaaaaaaacgctgcactcaagacgtcgggcttttgggcgcagacgatttccgggtttattccgaaggtcatgaactctttgaataacttaagctttacaatgattgcggcaatcggcggtttgtttgcgctgaaaggctggatctcgatcggctccatcgttgtctttgccgagtattcaagacaatttacacgccctttaaacgatctggccaaccagtttaatacgatgctgtccgcaatcgccggcgctgaacgggtgtttgacgtgcttgatgaaaaagaagagcgcgaggatgaaaagaacgccgtgcatcagcccatccaaacaggcagcattgaattccgggatgtgtccttcggttacgataaagggcagcagacactgaagcatttacagtttaccgtgcctgcggggcagtccatcgcgtttgtaggaccgacgggggcggggaagacaaccgtcactaaccttctcgcccgtttttacgagcctaacgatggaaaaattttaatcgatggtacagatattaaaacccttactagagcaagcctaagaaaaaacatggggtttgttcttcaggattctttcttatttcagggaacgatcagagaaaacattcgctacggcaggcttgatgcttctgatcaggaagtcgaagccgctgcaaaaacagcgaatgcccatagttttattgaaaggctgccaaaagggtatgacaccgtactgacgcaaaacggttcgggcatcagtcaagggcagaagcagttgatttctatagcgagggcggtgcttgccgatccggttcttctcattttggatgaagcgacaagcaacattgataccgttacagaagtcaacattcaagaagcgctcgcccgtttaatggaaggaagaacaagcgtcatcattgcccacaggctgaacaccattcaaagagcggaccagattgtggtgctaaaaaacggtgaaatgattgaaaaaggcagccatgacgagctgattcggcaaaaaggattttacagtgacttatatgaaagccaatttgagaaatagacctttgtcctgcacagaggtctttttttgttacagttttatagtacttttatttcattttcgtaaaatgtaacaaaattacttgacgtaaacaagttatgtatatatactagcttacattaagtaagtgataacatttatcaaggaggataaaatgaataaatcatttgaaattggcacattacttttaagagttattacaggtattatcttttttgttcacggtttatcaaagtttcagggaatggagggcaccatccaatttttcggcagcataggccttccaagctttatggcgtatgtcatcgcagcgattgaactgattggcggagtgcttgtcttcttcggattggctacacgtattgtcggtgtactgttcgctcttacactgatcggcgccatcatcactgttaagctgaaagcgccattcatgggcaatgcagaatttgattaccttctgcttttgacatccattcacctggcgcttactggaagtcgattcctggcgctggacccatttgtgtttaaaggaaaaaagaacggaaacgtttcagcataagaaaagaggcatgcagcatgaccagcattcatgaggatacacacattggctatgccaaactcacaattcgcagtctggagcgttcgcttcagttctactgtaacgtcatcggttttcaagtcttaaaaaagacggaccgccaagcggaattaacggctgacgggaaacgcgtactgcttattcttgaagaaaatccgagcgctgtcgtcttgcctgaacggtctgtgacaggcctttatcactttgcgattcttcttccggacaggaaagaacttgggatcgcgctcgcccgcctgattgaacacggcattgctatcggacatggagaccatgctgtcagcgaagcgctctacctgtctgatcctgacggaaacggcattgaaatgtacgctgaccgcccccgcagcacgtggcagcgtgatcgggaaggaaactacgtcatgacgacaaccgctgttgacattgagggccttctggaagaggcaggagatgagcggaaaacatcgcttccgaacgatacaatcatcggacacattcatctgcatgtcagtgatttgaaagaagcaaaggcgttttatacagatgtactgggctttgacattgtcggaaactatgcgggcatgtccgccctcttcgtttcagccggggggtaccaccatcatatcggcttaaacatttgggcgggaagaaatgcgccgcctaaaccgacaaatgccagcggactagattattatactgttgtcctgccccaccaagaggagctggatttggtggcaaaccgagtcaaacatgccgggtattcgattgaagagacggaaaacagctttcgtgtgaaagaccctgtttccggcgcctatattacatttgtgatttaactgcaatccccttgccgaaataacggcagggggattttttatttttgtccgccttgttatgatgagagaaccaacttgttaggaggcgtttacatggaactcaaccaccttgtgacgggcaaaatagcattaaatcaatatgtgcatcgcttagagcaaaaggatgtttcattttacgtccactactggggagcgatgacgaaccactataacacactgcttcataagcattccttttatgaaatttgttacgtggtaagaggtgaaggatattaccttgaaggcgatcgtacatatccgcttcgtgaacagacgatttttttgtcaaagccggagcatttgcaccaaatcaaaagtgaaacagggctgttccttttttacgtcgctttcgagctgagcgaggatcagtcaagcgccgaatggatcaaagtgatggaagaagtgaaacaaagcccctttatcacaatgcaattgaaagatggcgaaccgccgggcctgctttggaaaacgttaatgctgcaagcagcgcaacctgtcaatgcttttgacaaagagatcctatctcatttgtcgcatgcattgatcctgtcattaatccaaacctttctcccgtacgcccaacgcccgaaacaaaagcagcccattcacacatcttctgctttgctgacagaggtgaaactgcacataaaagacaatctgtcacagccgttaaagctgacggatgtcgctagccactttcatatctcagggaggcatttatcacgtttatttgcagcagaactgggcgtcagctactcagaatttgtccaaaatgaaaaaataaacaaagctgccgaactgctgaaatcaacgaatttgtcgattaaagaaatagcggaagaaatcggtttctcagtacattatttcactcgcgtcttttccgctaaaatcggcagctctccagggcttttccgctccctttataaagactcaaaaatgaccgcatttcaaatcaataaaccttttcaaaaaatcgaacaggccaagccgcacgaataagatgtcctgaaatgacaaaacaatgtcttcatatgataaagacgcgagaaatctcgttgtcttataatctttttagaaagcggttacaacaaggggtattgctgaaggagggatgcattggcttatgcttggtgtcgggtgctctgccattcttgaaagaaggggaagaaagccgtgagtacaaaaaagaaagaggctgtaataggaaaagaaagcttagctcataaagggcttttacgaacgattacattggtatctacattcggcggcctgttgttcggttatgatacgggtgtcattaatggggcacttccttttatggcaactgcaggtcagctgaatcttacacctgttacagaaggactggttgcgagttccctgcttctcggggcagccttcggggcgatgtttggaggacgtctgtccgatcggcacggccgccgaaaaacgatcctttatttagccttactcttcatcgcagccacacttggctgtaccttttcaccaaacgcgtccgtgatgattgcctttcgttttctgcttggactggcggttggctgcgcttctgtaacggttccaacctttttagcggaaatttcgccggcagaacgcaggggacgaatcgtgacacaaaatgaactgatgatcgtaattggccagcttctggcatacacctttaacgccattattggcagcacaatgggggagagcgcaaatgtatggcggtatatgctggtcatcgcgacacttccggctgttgtgttatggttcggaatgctcatcgtgcctgaaagcccgcgctggctggcagctaaaggcagaatgggtgacgccctgcgggtgcttcggcaaatccgtgaagacagtcaggcacagcaggaaataaaagaaatcaaacatgcgattgagggcacagcaaaaaaggccggctttcatgattttcaagagccgtggataaggcgcattctattcattgggattggaatcgccatcgtacagcaaattaccggtgtcaattcgattatgtactatgggacagaaattctgagagaagccggttttcaaacagaagctgcattaatcggcaatattgcaaacggtgttatttcagttattgcggtcatttttgggatatggcttctcggcaaagtccgtcgccggcccatgctgatcatcggacagattggcacgatgacagcccttctgctgatcgggattttatccattgtccttgaaggaacacccgccctgccgtatgttgtgctgagtttgaccattttgtttcttgcgtttcagcagactgccatttctacggtgacgtggctgatgctctcggaaatctttcctatgcatgtgcgggggcttggcatggggatcagcaccttctgcttgtggacagctaactttctcattggattcacctttcccattttgctcaatcatattgggatgtcggcgacattttttatctttgtcgctatgaatatcctagcgattctatttgtgaaaaaatatgtgcctgagacaaaagggcggtcacttgaacagcttgagcattcctttcgccagtatggccgccgcgctgatcaggaaatccaaaatcaaacaactcacttatcgtaacctgagataccaggaggaatctatcaatgaaactatcttatgtaacagacagcctagggcatttgccttttgaagacatgctcaattttgccgcaaagcttgggatcgatacacttgaaatgacaaccgggggctggtcgccggcacctcacttgaatcttgatgaattgctgcaaagcagcgaaaaaagaaaagaattttcacaagcgctggaaaagcggaacatgacactttgcgcattaaactgctcggggaaccctttagatccgggtgaattgggcaaatcgcacagagacataactgacaaaacgatggagctggctggattattaggcgtcaaaaaagtgatcatgatgagcggtttgccagccggcggcccggacgacaaagtgccgaactggatcacatacacagtaagctggcctcccgttttaaaagatatcctcaactatcaatgggaagacgttgcgatcccatattggaagaagcttgtcaaaaaagcggaggcctgcggcgtggggaaaatagcgcttgagaacttcagctctcaattagtctataatcctgagactctctttcggctcagaaatgcagtcggcccgatggtcggtttgaatcttgacccgagccatttgttatggatgggcgcagacccgatcatcgcagcaagggagctcggctcagccattcaccatgtccatgggaaagatgtcagaattgaaagatatttatcggcggtcaacggacttttagaaacaaaagaagtgacagatcctgcaaaccgggcgtggaattacgtagctgtcggctgtggacaggatttacagtggtggaaggaatttttttcagttgtaaaaatgatgggatatgaaggtgaggtttctttagaaatggaggatctgacgatgtcacctgaagcgggcatccgtacttctgtagaagctttaaaacaaaccatcagccaataggaggttttcatgatgctaaatggagaaagaatcatctctaagccgcttcgctgggcaatggtaggcggcgggcggctcagccaggttggatataaacatcgtattggagcgctgagagacaatactgcttttcaattaactgctggcgcttttgatatcgatgccgaaagaggaaaagatttcggggtgaaccttggagtggatgcggaacgctgttatcccaactatcaaaccatgtttgccgaggaagcgaaaagacaggatggcatagaggtagtatcgattgccactccgaacggcactcattatgagatttgtaaggcggcgcttgaagcaggagtgcatgtcatctgtgaaaaaccgctgttcttcacttcagcagaggggcaggaaatcaaagcgctcgcagagaaaaaagggaaaattgtcggcgtgacgtacggtttttcaggcaatcaaatgcttcttcaaatgcgtgcgatgattgaacaaggaatgatcggcgatattcgcgtggttgacttgcagtacacacacggtttttgtgcaacagatgaaggtgaaaagataagcgctgcacagaaatggcgtgtcgaccctgcgatcgccgggccaagctttgtgctgggcgatttatctacccacacgtattatatgtcacagcttattatgccaaagatgaaaattaaggagctgctgtgtgaccgacagagcttcgtcggcagccgcgcaccgctagaggataatgcccatgtgctgatgcattatgaaaatggagcggtcggaacgatgtggacatcgtcaatcaatgccggatgtatggatggccatagaatccggattgtcggctcaaaggcaagcattgagtggtgggacagcaagccaaatgaactgacgtatgaagtgcagggagagccgggccagacactcgttcgcggcatgccgtatttagatgatgtttgcaacgccgatgaacgactgggcgccttacacagcgaagggctgtccgaagcatgggccaatatttatcttaaatttgccattgcgatagacgccaaaaaccgtgaagatgaagaaatcttgaacaacttggtttatcctgacattgatgcagggatcgagggcattcgctggattgagaactgcgtgcgctcggcaaaccaagggtcagtttgggttgaatttaaataaatgagggaatgcgccgcatatgacataaagttcatatgcggtttttattttccagaaactcctgtcaaaaatgccctgaggcaggtatgataagaagggaattgggtatcgggagtgatgagcgtgaaagctcttttttttacgagaatgttcaccttgatggtgagctgtttaatgtatctgtccattgtgaaagaggataactggtttggatatgtatttatagcagcaggtgctgccatgtatgcagccaatcatgttttgctgacaaaagagacaaatgccatctggttctgcctgattgatattgcaatcggcttttcgttcggatttatctttcccggcacaggtttgttcattattatgctttgtccggttgcggtcgccttttttctgcgggggtttcctaaaagaacagcatggtctgtcttatgtctttcctctattttatttttgaccgtcctcatccgtacatatgcgatgttcggcaatgaatttgtcattgatcatttgactagcatgacattcgttgtcttctgcggtgtcgtgggcaaattaatccgcaagctgttggatgcgcaggatacggcaaaacagcagtttcaggaactgacggagtcccatctggcgctgtctgctgcacatcaggagctccatttatatgcgaagcaggttgaagagctgactgccatttacgagcggaacagaatggcgcgtgaaatccatgatacagtggggcataaaatgacggcccttctcgtccagctgcagcttttgcgtgaatggcaaaaaagagacagccaaaaagcggatgagacagtaggtgtctgtgaaacacttgcccgtgaagcgcttgatgatgtccgcttatcagtacgcactctgcaaactgaaaacgatccttcgctaatcgaatcgctgaaacagctgacagaggacttttgcaaaaatgcaggagtcacaacagaatttgcggtcagcggtgatcctgcaatcatcccgctgtctctccatccgaccctgatcagaacggtgcaggaagcactgaccaatgccaaacggcacggcggcgccgcagcctgttcgatacagcttgcctgcacaacggacagcatcagccttgtcattaaggatgacggcaaaggcaatcctgaggcagcacttggttttggtctcttgaatatgaaaaagcgggcagcggagcatggcggaatgatccgctttgaaagcgaacgggatcaaggatttactgtaaatgcagaattttcacttgccaataaaaaatggagcttcgggcccgtgcagcaaaaggagagtttatcatgattaagatcatcattaccgacgatcaggatatcgtcagagaagggctggcatccctgctccagctccgagaagagctcgatgtgatcgcaacggcgcgaaacggacaggaagccttcgaaaaggcgaaagagctggagccggatatcgtgttaatggacatccgcatgccggtttccaacggggtggagggaacaaaattaatcacaagctcgctgccaagcgtaaaggttttgatgctgacaacctttaaggattcagcgctgattgctgaagcgcttgaagagggagcaagcgggtatctgctgaaggatatgtctgcagatacgattgtaaaagcagtgatgactgttcattctggcggaatggtgcttccgccggaattgactgcccaaatgctgaatgaatggaagcgtgaaaaacagctgaaaggaataaatgagatagaaaaacctaacgagctgctcgacctgaccgagcgcgaaatcgaagttctggctgagctgggatacgggctgaataacaaagaaattgccgaaaagctttacattacagaaggcacagtcaaaaaccacgtttcaaatattatcagcaagctggctgtcagggacagaacccaagccgccatttactcggtcagatatggtgtatctgtcttttgacatatgacgttttgcatatacgcttctctgaaaaggccttttacaggcctttttttcatgccctatgttctatctgccgctacatgccgcacgcctttctttcttctacaatggcaatggatcaaaaaaaggagtgagacgacgtgctgcaagcagaaaacatcaaaaaggcatacggaaaaaaaacaatcgtgaaaggcatttctttttccctcaaaaagggggagtcgttcggtctgctcgggcctaacggtgcggggaaatccacaaccatctcgatgatttccggccttgtgccgcatgacagcgggaacatcacggtgggcggctatgttatcggaaaagaaacggccaaagcgaaacaaaaaatcggcattgttccgcaggaaattgcattatatccgacgctgacggctcatgagaatcttatgttttgggggaaaatgtacggacttacgcacggtgaggccaaaaaaagagcggctgaggtccttgaatatgtcggtctgactgagcgggctaaagataagattgaaacattttccggggggatgaaacgaagaatcaacatcggtgcggctttaatgcataagcccgagctgctgattatggatgaaccgactgtcggtattgaccctcaatcgagaaatcacattttagaaacggtcaaacagctcaacgaaacgggcatgacggtgatctatacgagtcattacatggaagaagttgagtttttatgcgaccggatcgggataattgatcagggggaaatgattgcgattggcacaaaaactgatttgtgcagccgccttgggggcgataccatcattcagctcacggtcagcgggatcaatgaagcgtttcttgtggcgatccgatctctggcccatgtgaatgatgtaacagtacatgaattagagctcaaaattgacatttctgcggctcatcatgagaaagtcgtcacaagcctgcttgctgaagccactgctcatcatataaacctgctgtctcttcaggtgcaggaaccgaatctggagcgcctgtttctgaatctgaccggccgcacgttgcgggattgaggagggacggcaatgaaaaaaagcatatggatcgcatggaaagatgtgaaaatcagaatcacggacagaaaagggtttatgatgcttatcctaatgccgctcatcctaacctgtattttaggcgcagcgctcggatcagttgttgacggaggcagccggattgatgatatcaaagtcggctacattcaatcagaccagtcagatacagcaaacatgtttacaaaagatgttctcaaaaaaatgaagtcgataaaggtcacaaaagtcggcagcaaagacaagatgaaaaaactgattgatgaaaagaaaatcgatgtaggcatcgttatcccgaaccattgggaagccggcaaaacctcagctgttgttaatgccgctcctgatcaaacattgaaaagttccatcattgaaacagctgcaagctcatttatagagcaatataaagcggtaaaggaagccgcgtcaggctcaatggactacatcagtaaaacggaagctgtaaagcaaggaaaacttgaccctgcacagtttgcagaaaagctggcaaagacgctagaaaaagaaacaggtgacaagcttactattgcggaaaaatctgtcggcagcaaagccgttaccagttttcaatactattcggcggcaatgctttgcatgtttatgctgtttcatatcacagtcggggcgaaatcatttttacaggaaaaggatacggagacgcttgccagaatgctgatgacgcctgcgcaaaaatccgtcattctcttcggaaaatggcttgggacgtatctgtttgccatcatacaatttttcatatttctgatcgtcacaatcaacgtatttggtgtggactggggcggtaatctgctgttagtgagtgtactcgggctttcttacgccgcagctgtatctggtatttcaatgctgcttgcgtcgtgcatcagcgatatgaaaactgcagatgcgataggcggcttcggcattcaattgcttgcggttctcggcgggtccatgctgccgctgtaccaatttccggacgtcttgcagtctgtatccaaagcggtgccaaatcgctgggcgcttgacggctttctttctttaatggaagggggaggctgggctgaccttcaaaagcctgtgcttctttttgcggcgatcggcttttgttcacttgtaattggtatcagacggcttcatacaagataaggaggtacaaaaggtgaaaaaaattctagccatttgcggcattgagctttctctcatttttaagaagccacagaactatttgatcatgtttgctgccccgcttttgcttacctttgtatttgggagtatgctcagcggcaatgatgataaggtgcggcttgcaatcgttgatcaggacgatacgattctctcacagcattatattcggcagctgaaggcacacgatgatatgtatgtattcgaaaacatgtctgaaagcaaagcgtcagaaaagctgaaacaaaagaaaattgccgggatcatcgtcatttcccgctcgttccagacacagctggaaaaaggcaaacatcctgagctgattttccgtcacggccctgagctgtcggaagcgccgatggtcaaacaatatgcagaaagcgcattggcaacgctcaatattcaggtgaccgcggcaaaaacggcatctcagacagcgggagagaactggaaggcggcgtataaaacggttttcgccaaaaaacatgaagatatagttccggctgtaacacgacagacgctcagtgataaaaaagagggtgcggaagcaagtgacacagcctccagagcagcagggttttccatcctgtttgtcatgctgaccatgatgggagcggctggaaccattttagaagcaagaaaaaacggcgtatggtccagattgcttacagcctctgtcagccgagccgaaatcggtgctgggtatgtgctgtccttctttgtcattggctggattcaatttggaatattgcttctttccacccattggctgtttggcatcaactgggggaatccggctgcagttattgtattagtgtcactttttctattgaccgttgtcggcattggattgatgattgcggccaacgtcagaacgccagaacagcagcttgcgttcggcaacttgtttgtcatcgcaacatgtatggtgagcgggatgtattggccgatcgacattgaaccgaaatttatgcaatccatcgctgaatttcttccgcaaaagtgggcgatgagcgggttgacagagattatcgctaacggtgcccgcgtcacagatattctcggaatctgcggcattttgcttgcatttgctgcgatcactttcgcagcggggctgaaagcgctccgagcctaaaaaacatctgccgtttaggcagatgtttttttgcatgtgggtacattcgtatgggtgcagcctgaactgcggttaatccttatctatcatagctaaaattgattccagccaagaaacgtaatttttctcccgctccagcgctttcgttagcacaagatagtggccgaagtccggtgaagaaaatgacatcggctctgctgaagccataagcttttcatagcttccctgtaagtcagaaagcttggcctggcgtttttgcagctggtctttgaacaaatcagaagcctcctggcgcgatagacaagaaatgaaataagccttcagcataaattcatccttcaccgtctcgggtatcggctggtggcggatcagccagtcatgcagctcctgctttccgctgtctgtcagggtgtacatctttttctccagctttgtgccctgaatcgttgtccggaacgtgataaatccttcatccgtcagctttttgagctcagggtaaatctggctgtgcttggcgctccaaaactggccgagctcctctttaaaataactcgtaatatcgtatccactcaattcgccttttcgcaaaagccctaatatggcgtattttaatactctcatgctatcctccgtgtctggctgtttcgcaaaacagatgagccggtgctcaactgtgattctaactgcctattccccttattatagaaaagggaggaagggaacacaaccgggctctttggaaatgaagataaaaggtttgtcagaaggtatccgatttatctccgtcaatataaaagagatttaaatttaattttcagaaaaaatagtaacgatattgattttttatatataataggaaattggtggtatgaaaattttttgggggaataaacgtgaaaaaagtacttatggcattcattatttgtttatcgctgattctatctgttttagccgctccgccgtctggcgcaaaagctgagtcagtacataatcctgtcgttcttgttcatggaataagtggtgcatcatacaactttttcgctattaaaaactacttaatttctcaaggctggcaaagcaacaaactgtacgcaattgatttttatgataaaacaggaaacaacctaaataacggcccgcagcttgcttcatatgttgaccgtgttttaaaagagactggggcaaaaaaagtagatattgtggctcatagtatgggaggcgccaatacgctgtactatattaaatatttaggcgggggcaataagattcaaaatgtcgtaacgcttggaggggctaatggtttagtgtcatcaaccgcgctgccgggcacagaccctaatcaaaagatcctctatacatctatttacagtctcaatgatcaaattgtcatcaatagcttgtctcggttacaaggagcgcgaaacatccagctttatggcatcggtcatattggcttgctttctaatagccaagtgaacggctatatcaaagaagggctgaatggcggaggcctcaatacaaattaatatcttcaaaaaacaacctgctgtctccgttacagtgggttttttcgtctgagaaagccatagggtcttatgaccttagtctatcatgcatacgtcaatttatgacatcaggcactttttcaaatagagcggacatgttaaggtacaaccatcgatttctatcaatttgaaataaaaggagcgctgttatgcaaattaaagaaatttttatgatccgctgcatttcgtgcttaagtgtcgtcttgctccatatcatttcaatggtcctgatgcttcaggcagaagctcttgcagatatttctcacactgttgattctttccgcacactcctgatgttcagcacgcccgcttttattttcatctctgaatttttactggcccgttcttatcctgatggggtgcctgacggttttttaaagaagcggggaaaagtgatttttgttccttttttatttatcgcagccatcgatgcgctgctgatgaccagtgcgatggggggagaggtaacctttctcgcgtttgtgcaaaaatatctggcgaacgtattcttaggaaactttatcggatacttcattctcgtcatctttcaattttacatgctgcatatgatgtttcatgagtatttgaaaaaagcatcgccgaaatgggtgctgtctatctcatttgtggtgacagccgcttatttaggctatttctccgcagccagcccggctcctgcttctgaagagggaggggcatttccgttcttctgggttccgttcgcaggctggcttttctacttttgtctagcctactattgcggaaaagaatacaagcgttttttagcgctgctgaaccaataccgctgggtggtgtacggcgccgcaattgcttctggggcgctggttgtcactgtttcttatgtcggtgaaatcggcatgatcagctcgaagcggcctgatatcatgctgtattcaacaagcatgattttcctgtgttttcatttgttttccaaaatgaagcatgtgccgaaaatcatgatgtttatcagcaactattccttttcgatttatctgcttcatgcctattttatgattataggctacgtgttgcttttgaatatgcccgaaattcctgccgtaccggctgttctcctgttgtttgccgtgtgcacagccggcccgattatgacctcatgggcgctgaataagttcaaatacgggtatttatttgtggggaaaatttatcagccaaaacagaagaaggtaacagtcgaagtgcgtgatcacgcagggtgaaaaacaagcggcaggagggctcctgccgcgtttctttacttctcatccgcttgcagaactgtttttaaatatagttttgcagactcagcaagtccagatacatcagccttttcttcatcgaaatacagggcgttttgaatgatgccgtcattcatattgaggaaaaacttggcgatagtcgcaagaggctgaaccggctgaaactctccctgatcgatccctttttgcaatagccttgaaaacctttccacaaaaagatcataccttttctccaaatactgccgccgttcttcattgcgccaagctgtcactaaatattcaaattgcaccggcgccagcgtatctgctacatctcgcaggccctcagtcagttcatccaaatagctggaaatggaggcccaaacactttggtgttcagctgatttatcaagctttcggagtccttcatccagccctgtttcaataatgcggcgaaacatctcctcagtgcttgaaaaataaagatagacaccgccccggctgaaacctgactcttctacaacatccttcatcgtcgttaattcgaatccttttcgtttaaaaaccgttttggcagcctctaaaatctctgcctgccgtttatccttgtgctcctttgttacttttggtgacaagatatcgcctgctttctgcaattttcttacctataagtgtaatcaacccaatcatgatcagcaagcagccacagacaagaaaagcaagtgatacaccgatccattccgccagcacgcccccgcccgccatgccgaggatagaggcgagggttgtcgcactctgaatagcgccgaacaccctaccgctgtaatcgacaggcactgttgtttgcacgagaatctgaaatggaatatggacgaggccgaaagccgcccccatgatgaaaaaagcaaatataaagagagtgatgccggcaattcccataccgcttaggaatggcgcacctccagttgctagtccaagaagaagggttccagctgagaaataaagcaaataagaagtgattcgccgtctgccggtaatggccgctgtaaggagcatcccggctccgcttacggccatgcaccagcctgccagctcgggcggagctcctgaaaaggagcggataagaataatcgcttgggaatcaccaatctgcaaaacaaagagaacgacacaagctgttagtaagcctgttaatagaagcggcatccgtttcaaaaactgaaggccttccttgatagaagtaagtgctgctgttttttcttgaggtgtattggctttttgtaaaaaagcatctctgggaaggaaaaacaaaatgacagcggaaagaaagaaggcgccggcgtttatataaaaaacagagtgtatcgagaaagcagcgatcagcgtgccgccaagggcagggccgaagatttttgagctgttatcaatgatgctgctgacggaaacggcctgctgaatgtgtgcttccggagccaattccttaagctttccgtttttagcaggtaaaaaaagtgaagaaaaacagctctgaacggatagcaatacgtaaagctgccaaagctcactgacataaacgcagctgataacagtgagggcacggccgatttcagatagaaacatgatcgtttttctgtcaaaacggtcggcaagcagacccgatacaggtccgagtacaatgacaggcaaagcaaacgacatcattaaaagcgacatatctaatggagaagcatgaagctgaaaagcggctaatgttagcacggccaaaatgtgaagccagtctccaagtgaagaaatggtttgcgaggctaacagtgtcatcagtcctttttgattgcgaaacaacggtttttccatgattcatcctcctgattattaaaatgacactagtgtcgtttttaattgtatgggaaaaagacacaatatacaatctttttcttgtaaaataaaggagaagattgaatagaagggagaacattcatgacatcagtcaatctaagctacccaataggagaatacaagccgagggaatccatatcgaaggagcaaaaagataaatggattcaagtacttgaagaagtgccggcaaaattgaagcaagctgtagaggtcatgacggacagccagcttgacacaccgtaccgggacggtggatggaccgttcggcaagttgttcatcatctggctgacagtcatatgaacagctatattcgttttaaattgagcttgacggaagagacaccggctatccgtccgtatgatgaaaaagcatggtcggagctaaaagactcgaaaacggcagatccgagcggctcactcgcgcttttgcaggagcttcacggaagatggacggctctgctccgcaccctgacggatcagcaatttaagcgcggattttatcaccctgatacaaaggagatcattaccctggagaacgcgctcggcctgtatgtctggcactcacatcaccatatcgctcatattacggagctttccagacggatggggtggtcttaacgcttttgccggcggaaagccggaatactgatagcagcaatcaccagaagtgagaccacagcagccgctgcatataaatgatcatagccgctggcgacactcgcatgaatggcgtcgcttatcgcggttttgacttcaggaacgggaatgcgttcgatttgttcttgtaaagaagaaacttcagaactgtcgatctccggaatcatctgcatcgccttttctgaatatccgctgtccgataagcggctgttgatctcatcacctatttggtcaaacccggctgtgataaaacctgcataaagagtaggcgccaaggtcagtccaatttgccttactaatgaaagcgtgccaagagctgtacccttatttgtttttgccgcttctgatacaaggacgttcagcggagcgcctaacagaaagccaaaaccgatcccagctgccacacttgcgatcacaaactcccatttttccgtgacccagagcggaaataaagcaaaccccgcacatgagatgattcccgaaagaataacggtttttacaggaccttttttgtcggtaagtgctccgccaagccaagcgccgattccggaagccaacgcaagcggtgtcatccaatagcctgcttttgcggcagggacacccaaatactgttcgacatatgacgggataaaaatgactgccgccaagagccccccggataacaaaccgatgataagcgtgcgctgaaacatatggtttcgcagcagagaatacgccaaaatgggatcgcctcctcgcatttcaactctcttttcatacgagataagcgctgcaaaacagagtatgccaaaaataatacatccataaacctccggattccccaagctgtgtaagagatttgccccgtcaagattggtcatgccgtacatcacagctaaaatcgacagggacaaaaggaagattccggccgcatcgaggcgcttagcctcaggtgcttttgtttccgcgataaaacatgcgccgaaaacaaccaatagcacggcaatcggcaaattaatcaaaaatagccaatgccaagacccggtccaatcaagcagaaagcttccgatatttggcccgagcacagcggccatcccgttcattgcgccaagcagcccaagcgccttcccctgtttttcctttggaagggtcgcgagaatgtgagagctgccgatgatgaaaatcccgccgcctccaagcgcctgaatcagccgcgatatcagaaagagcgggaagctttggctcaaagcaacaagcaaagaaccaagtccgaacaggcaaacctcaatgagaaagagtttttttctgccgtagcggtcggaaagttttccgacgattggcacactgacgctaagaccgagcgtataaagggtaatgccccatgatccccaggaaggggaaacggaaaacgactcgtttatcgttgttaaagcagccgaaataattccgttatctaaagcagccataaacacgccaatcgtaaacaggctgattgcccacttttggcttttctgctctgttaatgcttcagacattttcgtcaactccttttagttcacttgaaatatattattcattttaaatgaactaaatgtcaaataaaaaaagcctgctcccgcagtttgcggatgacagacttactgatttattcttttttcgcattctctaatgctcttgaaaggatagacagcccttcgtaaacagcctgcttttcttcaggggacagcagctctaatgaacgcttcaatttcaggtggcccttttcatacaaaccccggaaaatctttttcgcattctctgtcaactgaacaactacagagcggcggtcctcttcagaatgtgagcgtttgacaaatcctgatttttcaagccggtcaagcagcccagttgtattggacagggaagcccccattttttcagcaatgtcgctcactttcaatgttccatggttgtttaatagcatcagcaccttcatttgcggcatgctcatatccagtttcatccactcggacacatcaccgagcccggcggacgttaagactttcatatagagcacccatatttcccgttcctccgatgaaagaatgttttcgtttaagactgttgtatcgtgtaaattatattccatttcatcacttcctcatcattcactcctcttaccatattactcgattttcactcctgaaagaaagtgagcagaaaccgcatgcgggactttgtccgaaaaataacggtagtgtataatgagttggagattattgggggagaggatcgaactagaatatgattggagagaccattgctgattaaaaagaatgctttatcaatattaaaaatcgtttttcctattgctgttttgctatttgttatttatcaatcgaaaaaagaactgacaaatctgtcattcaaacgtacgctcatggtcatcaacggactggaacgaacggatttattcatgcttgtgttgatcggcttgctggctgttgcggctatgtcgctgtatgattacgtcctgaagtactcactgcgcctatcgatcacaaacggaaaagttttcagggtttcctggatcgccaattcatttaataatgtgttgggattcggcggtttagccggagtcgggttaagaatgatgttctataaggagcatacgaaagaccataaggcactcgtgaaaggaatcgcctggctcacatcatctatgctgctcggattatctgttttcagcattttcgttgctgcgagagtgctgccagttgatgaagtgattcatgagaagccttggctgtgggcggtcgttatcggttttgcactgatattgccgttatctttagcggtgtccaaaataaaagaccgcaaagctggggacgaagagaatgcggataaagtgaaaaatccgattttcgcatatattggagcttcagttgttgaatggctcatggccgggaccgtcatctattttgctttgttcgctatgggcattcatgcagatatcaggtatgtgttcggggtgttcgtcattgcggcgatcggaggaatgatcagcctcgtgccgggcggcttcggctcgtttgaccttttatttttgctggggatggagcagcttggctatcatcaagaggccatcgttacttctattgtgttgtacaggctcgcctactcatttatcccatttatcttgggactgttctttgccgccggcgacctgacggaaaatacaatgaagcggctcgaaacgaacccgcgcatcgcaccggcaattgagacgacaaacgttctgcttgttgttcagcgtgcggtattagtgagaattttgcaaggctcgctttcccttattgtgttcgtagcaggtctgattgtcttggcctcagtttccttgccgattgacaggctgacggttataccgcacattccgcgcccggcgcttttgctgttcaacggcctgtccttaagctcagcgctcattctgctcattttgccgatcgagctttataaacggacaaaacgttcctacacgatggccattacagcgcttgtcggcggctttgtgttcagctttttaaaagggcttaacatcagcgcgatattcgtactgccgatgattatcgtattgcttgtgctattgaaaaaacaatttgtccgcgaacaggcatcctatacactgggacaattgatattcgctgtggcgctgtttactgtggcgctctttaactacaatctgatcgcgggctttatttgggaccggatgaagaaggtgctgcgtcacgaatatttcgtccacagcacctcgcatattacacatgcaaccatcatggcgatcatcattgtgccgctgttcttcttgatatttacagtggtctatcataagagaacgaaaccgatcggagagaaagctgaccctgagcgtcttgctgcgtttctcaatgaaaaaggcggcaacgcgctgagccatcttggttttcttggagataagcggttttatttttctagcgatggaaatgcactgcttctgtttgggaaaatcgccagaaggctggtcgtgctcggcgatccatctggccaaagagaatcattcccgctcgtgctggaagaatttctgaacgaagcgcatcagaagggattcagtgttttgttctatcaaattgaacgagaggacatggcgctgtatcacgattttggctacaacttctttaaattgggtgaggaagcatatgtagatttaaatacatttaccttgactgggaagaaaaaagccggccttcgggcaatcaataaccgctttgagcgggaggagtatactttccatgtggatcatcccccattttctgatgcgtttttggaggagctgaagcaaatctcagacgaatggctcggctcgaaaaaagagaagggattctcgctcggattttttgatccttcctatttacagaaagcgccgatcgcctatatgaaaaatgcagaaggagagatcgttgcattcgcaaatgtcatgccgatgtaccaggaaggagagatatcggtcgatctgatgcgctatcgcggcgacgctccaaatggcattatggacgcattgtttatccgtatgtttttatgggcaaaggaagagggctgtacgtcatttaatatggggatggcacccttggccaatgtcggcactgcctttacatccttctggtccgaaaggtttgccgctgtcatttttaataatgtcagatacatgtacagtttcagcggcctaagagcctttaaagaaaaatataaaccggagtggcgagggaaatacttagcgtatcggaaaaacagatctctttctgtcaccatgttcctcgttacacgtctgattggcaaaagcaaaaaagactccgtctaataagacggagtctttttttatttcgtttttaagaagtaggtttcaatatcatcaagcaggtagtttgcggctttaattccgcctgcggttgtccatacgacgtcatcgacttcatgtgcattacctgacttcacggccttcaggtttttccatagtgaactgcttgtccactgattggcccatttttcattttcttttgcattatcggctttataagtgaaataaaacagcacatcagcatccatatcaggaatagattctttactgtcggttgagaacgtaaattggtccttttgtttcttaaacagttccacttgtttttcagggcgtttgaagccaagctggtctaaaataatcccaggaaatgaatcggtataatagattcttgattcaccggataaaaagcgtacgactgaaacggttttgtttgtctggtcgcccagcttgttttttaaatcagaaacacgtttatcaaaatcggcaatgacttccttgcctttgtccgccttattcaccgcgttggcgtatagagtcaggttatccttccagttcccggccaaagattcagcaaaaacagtcggcgcaatcgcatttaactgatcataaattttttcctggcgcactttgtttccaataatcaaatcaggctttaattctgcgatggcttccacattcggttccgtttcaagaccgacgtttttaacacctttcatgtcatctttcagatagtcataccacgggtcgcccttccatgactttacggctccgaccggcttaatgccaagcgctaagagcgcctctgttccttcattagttaaaacaacaatccgttttggattggcggggatgttgtctgatgtccccattgcatgtttgaccgttcttgttttgctgcttgacacctcgctgttgcttgaactttctgaactattacaggcagaaagtaccataacggccattaaaaatacgaatagcatgctgatatgctttttcatctttttcctcccaatattgaaattcattatcatttagatcataataagcagtgttaagagtgtcaatccctaattgaggattattctcaaaaacaaacattacatagtaaataactaggagaattagatcatgatctgcaaaaaggcatcttcaaaatggattgtgttagtatgtctgattttcattttactgacggctgtctgcgcaagcgtcgtgtatggctatacaggtacgtcatggagacaggtctatcaggcgtttacttccttcaatggaacaaatgagcatgtcatcatcaaggatgtcaggcttccgcgcgctttggttgcgacagtcgtcggcgcctcgcttgcagccgcgggcgctctcatgcaggcgctcacaaaaaatccgcttgcgtcaccggggattttcgggattaacgccggtgcaggtttttttattgttgccggatcgttttttctgcatattcagtcacctcaggcattagtatggagctcgtttctgggggcagcatttaccgctgcgatcgtctatgcagcaggctcgcttgggagggaagggctgacgccaatcaaactgacgctggcgggagctgccatggcagccatgttttcttctctgacacagggcttgctgtctgtcaacgaactcgagcttgcccaggtgcttttttggctgactggctctgtgcagggccggagtctggatctgttgatgacgatgtttccatatgcagcggcagcgctggtaatctgcttctttctcggccaaaaaattaatctcctcgttatgggagaagatgtggcaaaaggactcggccaaaaaacaggcctgctgaaatttgtgatggcgctttgtgttgtcatgcttgcagggtccgctgtcgccattgccgggccgatttcttttatcggcatcattattccgcattttgcccgctttgtcgttggtaatgattatcgctgggttctgccattttccgctgttttgggtgccattttgcttgtttgcgcggatatcggtgcgcgatatatcattatgcctcaggaagttcctgtcggggtcatgaccgccatcatcggaatgcctgtgtttgtgtacatcgcaagaaggggggcgaagctatgaaacttcgttttggcgttactgcggctgaaaagaaagcatggatcgtctttttggttttactggggttaacagctgctgtactcatcataagcgctggtctcggacaaaggtttattcctccctgggatgtagcaaaaacattctttggtgcaggttccaagctggatgaactgatgatcatgtcgttccgcatgccaagaattttgacggctttatgcgccggtgtctgcttggcagcggcaggcgcgatattgcaggggctcgtcagaaaccctctcgcatctccggatattatcggaataacaggaggagcggcggtagcggtcgtgcttttaatgatgttcttctcagaccgcagcagttcacttacgatcagtctgtcatggcttccagcagccgcatttatcggcgcatcggctgtcgggctcatcgtctatttactggcatacaaaaatggcgcctccacatttcggctggtgcttatcggaatcggattttcaatgtcggcgcaggcgatgactaccctgttgatgatcaaaggcccgatttaccgagcatcacaagccaatgtgtatatcactgggtcagtttatgggtcaaactggcagcatgtaaaaatagctattatcttatctgtcattctcttattcatttgttttgtcgcgctaaaaaatatgaatatacaggtgctgggtgaagatattgcggcgggtgcaggaagcgctgtgcagcgaaatcgttttttcttgctccttttgagtacggctcttactggttgtgcagtttcagttgccggcacaatcggttttgtcgggctgatggcgccccatattgcaagacggcttgtcggctcatcttatggcgcgctgctcccagcgtcggcacttattggagctctgctcgttttaacagctgatatcgtcggcagaaccttatttgctccggtggaagtgccggccggcgtctttacagcggctatcggcgcaccttattttatttatttgctctataaaacaagaaattcttaatcgttacacccattttcttaaaaaagaaaatgggtttttttgataatgactgaagattcgtaattatttttgctatactgacagagacattgataaagaaagggcggcagatgaatgaaagaagcagaggtattaaaatatgaagcatttacaagcagtcccggcaaaggaaaccccgcaggcgtcgttttgcagggagacgattatacggaagacgagatgcagatcatagctgaacgtgccgggtattcagaaacctcctttatccgaaaaagcgagtcggccgatcttgaactccgttactttacccctggacacgaaatgaatttgtgcggtcatgcgacagttgcttctctttacgcattatgtgagaaaggaatgctggagagcggtaaaacgtacagcatccaaacgaaagcgggtatcctgcctgtgaagatttctgaaaaagatggccgcattcatatcacgcttgaacaggcctctccgcaattcaaaccatttacaggcgatcggaaaaaacttgcggacgcactgggtatcaccgatgaagattttcatgaagaccttccgattgtgtttggcagcactgggatatggacagccatcgttccgcttaaatcattggaggcttccaaaaaaatggtgccagataacaaacaatttccggaagtgttagttgatctgccaaaagcttcagtccatccgtttacctttgaaaccgtccatcccgacagcgacctgcacgggcgccacttttcatccccgtattcgggaacgattgaagaccccgtgaccggcacagcatccggcgtgatgggggcttatatgaaacattatggcaatgccgagcagcataaatttatcattgaacaagggcaggaaattggaaaagacggaaaagtggagatcgaaatgaacgaagccggcggccatgtgaaagtgaacatgacaggaacagccgtttactcagaaacccgtattcttaaaatctaatacggatgatggtttacaaaaagatgcactttccgttatcattatgaaatgataatcattttcaattgcataggaaggtgagacggtatgcctcaaaccgaacaaatacatcagcattcagtactgagggacatcatacgcagcagaagatcgattcgaaagtttaaacaagagccagtaccttcagcagtcattcttgacatgcttgaaacggcaaaatatgcgccaaatcacagagtgacagagccatggagatttatttacgtttccagtgagacaggtaaagcgaacctcattaatacatttgcagcgttctctaagaaatccaagccggatatgacagaggaaaagcttcaaaatttcaaaaacacacttgggcgcgttccgggatttctcctcgtcgtgtttcaggaagatgaaaacgaaagagcgcgggacgacgattttgcggcaacaagctcgttgattcaaaatcttcagcttctcgcttgggaaaaaggaatcggcatggtttggaaaagcggaaaaatcctttatgacaaagaagtccatcaggcctttggtttacaggataatgagcgtttcgccgccatcatacaaacaggttatcctgacgaggcgccggaagtgaaaaaacgcacaccgatccgcgaccgattcactgaaatgtaaaaaaccccttgtctcaaacggagacaaggggtttttcattaacgagatttctttttcgctctgttgtcggctgctttcgcacgctcttgcgcttcgcggtcatctgcatcagcaagctcggttgaatattcttcgtaaacgccgtcagtttccctttttaaggcatcgggaacttgtggaagcttttgtttgtttttatcacggtttttgtggatatgatttctgcccatatcaaattccccctaaaaagtgatatcaaacaaatatagtatttggttttaaggggctatgtattcctacttccgcttagcagctttttccgcttttttaaattcgcctgaataaagaacttcctgcatttttttcaggttggcgccttgctggtgcttctccctctttttttccataaaaaggacctccttcaaccatgttattcttaaggttgacgcttcctgctgtttttatacagtctttcggtccgctatcagctgtgagagtgcaaattcaagatccgaatatgtaaaacgaaatccagaggttatcgcttttttcggaagagcgcgctgtcctttcacaatcaaaagactcatttcacccaatgcttttgataaaaagaattccgggacggggagccagtgcgggcggtgcttcacccgtgcaatcgtttttccgaattgcttcatgtccacaggattgggcgcggtgacattcattgggcctgagatgccggcgttttccaccgcatatcggatcatctgggccgcatcctcgacatgaatccatgacagccactgccttcccgttccgatcgttccgccggccagaaacttataggggagaatcatgagcgggagagcgcctttttctccaagcatcacgccaaatctcgcataaactgtccggatgcccatcgcttcaatatgctgtccttccttttcccacaggtgtgcagtatggctgagaaaatcctcatctgacgttgcagaatcctctgtgaaagttttctcaaggcttgtgccgtaaatgcccacggcactggcttggatcaatgtcttcggcttctccttctgtttctgaataagccgctgcacttcacgcgtcgcattgatacggctggagagaatgtgctgcttcgttttttctgtccagcggccaaaaatcgattttcccgcaagatttatccagacatcaatatgaggaagttcctgctccggtgcggctccttccgacagccattggacatatgtcatatttttttgttcagtttcccttgcgtttcttgataaaatataaacatggtgtccctggcgggtaagaacgcctgtcagatgctggccgagaaaaccggttccgcccgtcattgcgatattcatgaacatctctcctcatcgttctaataaatatactttacctcattgtaataaaagaaaacgcgtttcaggcctgagaagggagattaagatgccgtttattacaaaaatatcaacgcaaaaaaagaatacggaacgcttcaatatttttctggatgataaatacgccttcagcgtggacgcggatgtgctcgtgaaatttgagctcaagaagggaaaagaactcgatgatcttgacatcattgagattcaatacggcgatgaagtgaagaaaggcttcaaccgtgcgcttgactttttatcctatcgaatgcggtcgacgaaagaggtcgaggatcacttaaagaaaaaagaaacctcgccccccgtcattgcggaagtcatccataggcttaacgattacaagtacttaaacgaccaggaatttgccgcagcctatgtcagcactcacaaaaaaacaaacggaaaaggccctgatgttttgttcagagagctaagagcgaagggaattgatgacgatacaattaaggaggcgctaagttccttttcctttgaagatcagacaagagaagcggtcaagcatgttgaaaagcttctcaaaaaagataaaaagctttcgacgaaagaactcaaacagcgcgcccagctgcagcttcagcgcaagggcttctcatttgatgttatcagcgcggcgatggatcagattgaatatgaaaatgatgaagacacagagaaagaagcgctgcgccttcacgcggaaaaagcgtttagaaaataccgctatgacggctcatatgaaagcgccatgaaggtcaaacaatttttattccgcaaaggattctcactcgatttaatcgagcaattactgcaggaagaggagtactgaaatggagaaacgatacagtcaaatgacaccgcatgaactcaataccgaaatcgcattactttctgaaaaagcaagaaaagccgaacagcatggaatcataaacgaactggcagtgctcgaacggaaaattacgatggcaaaagcatatttgctgaacccggaagattactcaccgggagaaacatatcgtgtggaaaacactgaggacgagtttaccatcagttatttaaatggcgttttcgcatggggatacaggacctcttcccctcagcaagaggaagcgctgccaatctcagtattgcaagaaaaagaataaagcgtaacaggaggctgatgatcagcctctttttgtttgcagcacatttacacgaattcttaaagaaaaaatcattgaattcacttgaaaaatcttttaagatgaaactcgttgttttttaaaatcaaaggaggcgatgacgttgagtatcaaaaacccatctgtaaaatttattatatttgttcttatgatttgtacattttcaatcggctatacagaatacgcggtgatgggtattttgacgtcgattgccaatgactttcatatacaggtttcatccgcagggcttcttgtcacggcttatgcggcaagcgtttgtttgacagggccgctcgtcaccatcatttccgtcaagcttccgagaaagcctgtgcttcttgggctgatggcgatatttatcctttccaacctgatgagcgcactggcgccgaattttgcggtattggccatttcaagaattttatctgcgtccattcacggcgctttcttcgcgattgccatggtattcgcaagtgaaatggttccgccggaaaagcgtgctgcagctgctgcttcaatgaacggcggactgacagtggctctaatgcttggtgttccattcggctcttatctcggagatgtcctgaattggagagcggtgttttccatcattacggcacttggtgtcatcggatttttaggccttatggctgccgtgccgaacagaaaaccaaaagtgatcccaatgcttatgaatgagtggggtgtttttaaacacaaacaagtgctgttttccttcgcgattaccattttaggctattccggtgtctttatcgcctacacctttatcgaacccattttgaggcattcagccggattcagcacggttggcattacaggtgctctctttgcgtatggattgggaggcgttgccgggaatttctttgctggaaaggtaccgctgcctttgctgactcggacgatgatcggcgtaatgatcggtttaatcggtgttctggctgtatttccttacatcgccatttacccggctgcagccattgtggcaacgttcctattcggggcatgcgcattcggcacgccgcctcttctgcaaacaaaggtcatttcctcatctgagggcggcacaaccattgccgcagctgtcagcgtatcagcatttaaccttgccaatgcccttggtgcatggatcggcggaatgattttaaacggaacaggctcttattcctggctgtttgcaggaggtgcgcttatgaccgcatgcggacttgtgctttctaccttcgcacacttatcagaaaagaagagcgtctacgaatatcaagtcaataaagggtaaaaaacagctgcagtgtatgcagctgttcttctttaccgtttgcctgaggctctcattctttcttgaggatgctgattgatagatccgtcagcacgctttgaagcatagtcgtcctttgctctcggttcaccctgaaatttgttttcgttttcgtaaggaaatcctttttctttatttcggaccatgtcatatccccctaggttcgagatcaaaaagttgcgtcttttcagatgaagacgtaaggttagtatatggagaacaccacgtaataaagcgttatttttttcctgaagaaaggagactgcacacatgaatatgtacattgagaaactgactaatctgcttctggaaaagaacgagatgatcagctatatacaggcaaaaacgtgggtggaattgttatggagcgatttcgaagcaacctacgcaaaagccggacacgcctatcaaggtgaaaaaatgactgaaaaaatcgtcacacaatggattgaaaactatggcggccagctccacctttttcaaagctcccgtaacgacgtgaatgattacttaaatcaaagcagaggccttttgcattaaaaacctgccgttaacgaccggcaggttttttcattttcttaaaattaccttaacaggaagaaatcataaacaaaacatgtttcaccagcctgtcaatcagggaataccacttatatcttgtcaaaatgcgaggaggagctttatatgaaaaagaaacaagtaatgctcgctttaacagctgccgcaggactgggtttgacagcacttcattccgctcccgcagcaaaagctgcgccccttcacgacatatctgtcagcatgccatcatccgatacttacatcataaaagcaggaaagctgaatgtccggactgagccaaatcatgaaggtgatattctcggcactgtatcatcagaacaaaaggtaaaagtcgataggttcgtaaatgccgattgggctcaaattcatttcaaaggaaagaaagcatatatttcaactcactttttaatgaaaaccgcaagccaagcgaaaacaacgaaacagacagccttctatacaccgacgcccgaaaacggaaaagctaagcagctctcatctggaacagaggtgacaatacttgggtggggattcagtgaaaacggcggatttgacttcacttgggcgttcgtggattatggcggagttaaaggctatattcacacaaaggatttacaaatgcgataaaaaggcaggccgaggcttgtctttttgcctatgcatgaaacatttcttctttctgcacgtaacaatgagaaaggagatgatgatatgacgggtttagtcggcggagggcttatgatcattgcgggcatactgatcaaactgtttcctcccaaatcgatcaacagtgtgtacggatacagaacgagacgctcaatgtcagatcaaagattatggaatgaagcgaaccgttacagtgcatcattaatgatcctgtcaggcttggtgattgcgggaatgggtttgctgctgggatcaaacttgtttattcttcagcttatcctgctgattgccgcctgtgtcataacatttatgctaacggagaaaaggctgaaaatcatgacgcacagtcaaggaggagatagaagtggacggagttaaatgccagtttgtcaatacgaacggaatcacgcttcacgttgcagccgcaggacgggaagatggcccgttaattgtcctgctccatggatttcctgagttttggtacggctggaaaaatcaaatcaaaccgcttgttgatgcgggttaccgggtcattgctcctgatcagcggggctacaatctcagtgacaaaccggaaggaattgattcgtatcggattgatacattaagagatgatatcatcgggcttattacgcaattcactgatgaaaaagcaattgtcatcggtcatgactggggaggagctgtcgcatggcatttggcttccacacgcccggaatatcttgaaaaactgatcgcgatcaatatcccgcacccgcacgtcatgaaaaccgtaacgccgctttatccgccgcaatggctgaaaagctcgtatatcgcatacttccagctgcccgatataccggaggcatcactaagggaaaatgattatgatacattagacaaagcgattggattatccgaccgtcccgcgctttttacatccgaggatgtcagcaggtacaaagaagcgtggaagcagccgggcgcgctgacagctatgctgaactggtacagagccctcagaaaaggaagcttggcagagaaaccctcttacgaaacagtaccttaccgaatgatctggggaatggaagaccgctttttgagcagaaagcttgcgaaagagacggaaaggcattgcccgaatggacatctcatctttgttgatgaagcttcccattggattaaccacgaaaagccagccatcgtcaatcagctgattttggaatatcttaagaaccaataagctaaaatttctctccatccgtctgtcataatggcagactttttctgtgcgttttttttcatagtctgttttaaacatgacaaaataacattaaaaatcatgaatgtcaccataaaattgtaacaaaaaacaggtttaaacgactttaaaaaaaggaatagccttactgaagatttgtgtaaaactcccctaaggcaatacttaaaaagaataataaaaagaaggtgccttaatgaagcaaggattaatctcgattattatcccgtcttacaatgaagggtataatgttaaactcattcatgaatctttaaaaaaggaatttaaaaacattcattatgactatgaaatattcttcataaacgacggaagtgttgatgacacgcttcagcagatcaaagacttggcagcgacgtgcagccgggtaaaatatatatctttttctcgaaactttggaaaagaagccgcaattttggcgggctttgagcatgttcagggcgaggcggttattgtcatggatgccgatctgcagcatccgacatatttgctgaaggaatttatcaaaggctacgaagaagggtatgaccaagtcattgcccaaaggaacagaaaaggggacagctttgtccgctcactcttatcatctatgtattacaagttcattaataaagcggtggaagtcgatttgcgtgacggtgtcggtgacttcagattgttaagccgccaagctgtgaatgcacttttgaagctgagcgaaggaaaccgcttctcaaaaggccttttttgctggattggctttgatcagaaaattgtattttatgaaaatgtcgaacgaaaaaacggcacctccaaatggtcgttcagcagtctgtttaactacggaatggacggcgtcgtttcatttaatcataagccgctgagattatgtttttatacaggcattttcatcctgctgctttccatcatttatatcattgccacattcgttaaaattctgactaacggtatttctgtgcctgggtatttcaccattatctcagcagtgttatttctcggcggagtacagctgttaagtcttggaataataggtgaatatatcggccgaatctattatgaaacaaaaaaacgcccgcattatttgatcaaagaggcgaatatcccgaacaaagacctgcctgaaacgaacgaattaaaaagcatgcggcgtctgacaaaaatgcactgaaaataccaagcgccattggcagtgctttttttgcgtgtctattatcttaaaagcaagactggagaattcatatgaaaagaaaacatatcatgatctatgcggccagtttgctggtgtccgttctggcacacgctttttttgtgaaagaatgggcggaaggcaggtatatgacaggtccgggtgacgggcttgcgcaaatgatcgtatttaaaaaattattatttgaccaatatacacacgggaattttttctacaattattcattcggacttggcggcggcacattcagtcagctcggctattatttttctgcgtcttttctttttcttgctgtgtctgccgctgtttggctgcttcaagccgtccagctgatcggagaaacggatacgcttttttgggcagagtcagctgtttttatcagtattttcaaattgagcttgatcatctttacgtccgcttctgtttttcattatcttcttaagcacagggcggcatcgttcacgggagccgtgttatacggcgtctcaattatttatttccgtcacgaagcgtattgggaatttttcaccgatacaatggtttggcttccgctgcttgtgcttggcgcagaaaaaattattagagagcggcgtccggcgtggtttatcgttgcgtgttcgctgacgttaatcaacaatttttactttgcatacataaaccttatattcatcggaatctatgtgctgttcagatggctgatccgtttggaaccacatgaagagaaaagatggattcaaatcagattatttctcgtttcaggcttcatttcttttggcatcagtgcggcggcgtttgtgccggtagtatacggttttttaaacaacctgcgccctccatacagccagaaaatagagtggctcaatttcgatgataatatcttattttcgagccggatcatcattgtgccggccgcttttctgctgtttttgtttattatttctttttacaaaaaccgtgtgtttcgtctctttgccgggttgagcctgctgtttattctgtttcatttcagtccgtatgcggcaagcgtctttaacggtttttccgccccgcaaaaccggtttgaatatgttctggcctttaccattgcgggagcagctgcggctggtttgtcacagctgtctgaattgaaacggaaagaactgctcccggccgcagctgtcgtcctgcttctttacttgtatcatatccaaaggtataagctcgatatatggaagcctgcgaatgaaagtattctattgctcttactcatgacaatcgcagccttgtttgctgcagcttttgcgaaaaaacgggcaaaaatggctgtgtacggtataatcattctttcttcgctgtttgtcgccaactcctatcaaaaatacgcgctctcagaaggcggcgatttggacagtgtgacaaaagaatatcttacaagtgaggaatacagagggcgggaatcatctgagctcatcagacgtttacagaaggaagacgatgacccgctcatgagaatcgactggatgaacggggtccgcaataatacgccaatcatttacggatttaatggcttcagcgcgtattccagcattttaaacaaagatctgctggccttctattggaatgatttaagcatcgatatgggcagggaaagcgtcagccgttacgcgtcattgggagacagggcgaatttatacagcctgctttacggcaaatattatatgaccgaaaaaacaaacgaagccagcgtcccgtacggcttcaaaaagcatttagaaacagagcattatgcagtttatgagaatcagtacatgcttccattcgttaaaacagcggatgccatatacagcgaaagtgagctggaccgattgcccgctcttgcgaaagaacaggcgatgctgaaaggaattatattaaaagatccatcaggaaaaacggagcagacaccaaaaccgtccaatttgatcaccaagtcggacatcaccgcaaaacaagcccagtatcaaaacgggctgctaaccgtaactggagaaaacggaggagagctgatcatcaccccgaaacagccatcatccgctccgggagactactatgtcagcttttatttgaaaagcaaagcaaaagacaaaggatttacattaaaggtaaatgattatgtcacaacaaggaaatcgaacaaatcgatctataaaaccggagtaaataatataacggtaagagtgcctaaatcaggccatatctcaatcaatcttccgaaaggaacctatgagctgagaaacatagcgctctatgaagaaaattaccaaacgctgaaaaacgctgtaatgcaaaataaaacagagaaagcagacaaactgaattggaacaaaaatcgactgaccttttcctatcatctgtcaaaagaccagtacatcatgcttccgatcccatatgaaaaaggctgggagctgaagatcaacggaaaaacacagaagatcgaaaaagcggattatgcttttataggcttcaaggcgcaaaagggagacaatcacattgagctgacttactatccgccatacttcaaaatatcggcgatcatatctctcgtcagtctgctgcttgctgttttttatataagacgtaaaaagcccggctctatatagagccgagctttaattttttctgaagtttttcttcgctgaatatccatcccgtataggatgaacgaatcgtgagatcatggccgatatgaacaattgcgacaaacggataatggcctttgctccgataacgcaggtcgataaatctcacctcataatgatctttaaacgtatccacttcccaccggtataccggagaaaaggacagaaacgccgcgatgttatcatcctgctttgccgcatgcattacatcggtttcaggaacaggcacccgattaaatgtatccagaatcacgacatgtccttccatgcttcttcctacatagaaagcatgtgctgtcgtcactgcgattcgccattgcctgaatttcatcgttggagaaataataatgctttcgatctcatcatgaatcatctcatgaagcttccgtttaattctcagctgcatgatcaggcgcaccaagtagtagcctaccaatatgatatataagctgagaaacgtgatgccgggactcccgcctgcataccaaatcgcgatagctgccagatggctgataaaaataaacggatcaaacgtattaatcagcccgagcgcaacccattttttcgaaaacggacgaatggcttgtgttccataggcgttgaatatatcaacaaagacatgcagaacgactgccagcagtgtccacagccacaggtgcagaaaatcggcctgaggataaaataaatacagaatcgccgggatgatgacagaccaaaacaaaacggcgggaattgaatgggtaaatcctctgtgattccttatataaacagcattgtttttaagctttaacacagtatcaatatccggagcctgagagcccgcaagcgttgcgatcataacagcgtgagccattgccggatctgatccgacaacaggatcaagcgtcgcaataccgcccagtgcgatgcccataacgacatgtgtgcccgtatccataggtgacctccttgcagggtgatcctgcacattcactttgtaagaaattccccattttcatatacccaatttttaaactgattcaatcgttctcatatgtttccgctttttctttattactatttaatgtaacatattatcgtactgtgcccttagtgtacaacaaaaaacagtctaaagaaaagcggggcgcgaaagactggggagaaacacatatgaacgtacttgaagacaaattaaaacaaaaagacatacagcaatttcgcgatgatttaatctcatggtttgaacgagagcagcgcgttttgccgtggagagaggaccaagatccatataaggtgtgggtatctgaagtgatgctgcagcaaacgagagtagagacagtgattccttactttctccggtttgtagaacaattcccgacagtggaagcgctcgctgatgctgatgaagaaaaggtgctgaaagcatgggaagggctcggctattattcgcgagtcagaaacctgcaaagcgcggtaaaagaagtgaaacaggaatacggcggcattgttcctccagacgagaaagattttggcgggttaaaaggcgtcggcccttatacaaagggagcggtgctcagcattgcctacaataaacccattcccgcggttgacggaaatgtgatgcgtgtcatgtccaggattctatctatttgggatgatattgccaaaccaaaaacaagaacgatctttgaagacgccatacgagcttttatttccaaagaaaaaccatctgaatttaatcagggcttgatggagcttggagccttgatctgtacgccaaaatcaccctcatgcctgctttgcccggttcagcagcattgctcagcatttgaagaaggcactgaacgggagcttccggtaaaaagcaaaaagaaaaagcccgggatcaaaaccatggccgcgatcgtactgactgatgaagacggacaagtgtatatccacaaacggccgtctaaaggtttgctcgccaacctgtgggaattcccgaatcttgaaacacaaaaagggatcaaaactgagcgtgaacagctcattgctttcttagaaaacgaatatggcatacaagctgatatcagtgatctgcaaggtgtagtcgagcatgttttcacccacctggtatggaatatttcagtgtttttcggtaaagtaaaacaagtgtcggataccagcaagctgaaaaaagtaacgaaagaagagctcgaacaatttgcgttcccggtgtcacatcaaaaaatctggaagatggcaggagaagcagccgccatctcggctgctccgtaaaccattcttaatcgtaagagacgcgcgtgccgtggctgtagtccgcttcattgcgcttcattccgccgcgcgcttcaatttcttgcgttaattcccggtattttgattggccttcttcgttcaaataaggcataatttgctgaaaggcatgatgaaaataagcgagttcactgttcttccaatcttttttggaaaccatgttcaattcgctcatatcacgtccgacatacataacagaagaccccctttaaagttcttgccattattgtttgtggaaataaaagaactatacgctacaaggagatgaggaaaaatggaacaaaataaatgtgcactcgtaacaggaagcagccgcggtgtcggaaaagcggccgcgatcagacttgctgagaacggctataacatcgtcattaactatgcacgcagcaaaaaagcagcattagaaacagcggaagaaatcgaaaagcttggcgttaaagtgcttgtcgtaaaagcaaacgtaggacagcctgcaaaaatcaaagaaatgtttcagcaaattgatgaaacgttcggcagacttgatgtttttgtcaataatgccgcttcaggagtactaagacctgtcatggaattagaagaaacacactgggactggacgatgaacattaatgcgaaagcattgcttttctgcgctcaggaagctgccaagctaatggagaagaacggtggcgggcatattgtcagcattagttcattaggctctatccgctatcttgaaaactacaccacggtcggtgtatcaaaagcagcgttagaggctttaacccgttatcttgccgttgagctttcaccaaaacaaattatcgtcaatgctgtttcaggcggagcgatcgacacagatgcgctgaagcacttcccgaatagagaagatctgcttgaggatgcgcgccaaaatacgccggcgggacgcatggtcgaaattaaagacatggttgatactgtggagtttctagtgtcttccaaggctgacatgatccgcggacagacaattatcgttgacggcggacgctcactgctcgtttaaaaatttttaaaaaagaggaatagctatacgatcacctgcacattctaatgaccgtggaggtgataacaatggctaactcaaataacttcagcaaaacaaacgctcaacaagttagaaaacaaaaccaacaatcagctgctggtcaaggtcaatttggcactgaatttgctagcgaaacaaacgctcagcaagtcagaaaacaaaaccagcaatcagctggacaacaaggtcaattcggcactgaattcgctagtgaaactgacgcacagcaggtaagacagcaaaaccaatctgctgaacaaaacaaacaacaaaacagctaatcactgaaacagaaaaaagcacttcatcttcgggtggaagtgcttttttctgtttgaaaaacgacaaaacttgtggaaggtctacagaatgagtcaaagggtttgctttatggagatcgaaatgattaaaggaggaaatgtttatactttcatcaggctgaaggaggaaccgatgaccgaatttgaaaagctggtaagtgaacagatgaaaacgatggataagcttctcgatctccaatcagagctcgaccgctgcaaacaaattgaggcggaactccggcatttggaaagggatgcaaggctgcgtgggattcaggctgaaattgcggtaaaacggaaacaccttgccgatatacaggatatgtttcaaaagcagacagagcaggtcattcgttcatatcgcagctcagaaaagccgtcttcctttgtgtagtgcaggaatgtgccattccccggccggaatggctcttttattttcatttttcaatttgtaacgttataataggtaaaagacgttgtcggtaagcaaatttggacatactaactgtagggctttatagaaagtaggggagaaatatgggctatcccaaggaaggagaaaccattcaaattcacagctataagcacaacgggctgattcatagaatttggaatgagacaacaatcttaaaaagtacagaaatgtgtgtcatcggagccaatgaccggacgatggtaaccgaatcagacggccggacatggataaccagagagcccgcaatctgttattttcacgcaagacaatggtttaatgtcatcgggatgctgagggaagacggggttcattattattgcaacatcagttctccgtttgcctatgatggcgaagcaattaaatatattgattatgacttagatgttaaggtttttcctgacatgacctacaatattctcgatgaagacgaatatgatgatcatcggaaagccatgaattatccaaaagaaatcgacagtattttaagagactacttaaatacgctgctccattggattcaccagcgtcagggaccgtttgcgcccgagtttgtcgatatgtggtatgaacggtatttgcgctatacaaaataatggttacgtaaaaacctgttgcggggtacaacaggtttttcacatgggctcacacacatcatgataaagagagagggggaatcaaccgtgggggttatgaaacgctacatgcaattcgtcaaaccttataagaagcaaattttcgttacagtgttaatcgggatcgtaaaattctccattccgcttgctctcccattgcttctgaagtacgtagttgacgacattattcaaggaggcggcacggccagtgacaaaaccacgtcattgttcacgattatggcgatcatgttcgccttatttttaattttgcgcccgcctgttgaatattaccggcaatattttgcccagtggactgccagcaaggtgctttatgatataagagctaagctgtttgaccatatacaaaaactgagccttcgtttttacgcgaatacaagaacaggggaagtcatttcccgagtgattaatgatgtagaacaaacaaaggatttcgtcatcacagggctgatgaatatatggctcgatatgctgacgattttgattgtaatctctatcatgctcacactggacgttaaattaacgctgatctctatcgttttattcccattatacggaatatcagtgaagtatttttacggccgtttacgaaagctgacaagggagcgctcacaggctcttgctcaagtgcaggggcatttgcatgaacgcattcaaggcatgcctgtcatcagaagctttgcgatagaagatcatgaacaggctcaatttaatgagaaaaacggtcatttcttagataaagccatccgccacacgaattggaacgcgaaaacctttgcggtcgttaataccattacagatttggcgccgctcatcgtcatagcgtgcgccgggtattttgtcattaatggaccgctgacagtcggaacaatggtcgcgtttgtcggatatattgacagaatgtacaaccctgttagaaggctgatcaattcctctacaactttgacacagtcaatcgcatcaatggacagggtgtttgaatttattgacgagccctatgaactcactgacaaaccaaatgcgataaaggccgatcagattcgcggaggagtggagtttcaaaacgtttcgtttcaatatgagaaggacaaagaaaatattcttcatgatgtatccttaaaagtaaatagaggagaaactgtagctctcgtcggcatgagcggaggaggaaaatcaacgctcgtcagcctgatcccaagattttatgatgtaacaagcggcagactgctgattgatgggacggatattcgcgattatgaagcaagaagccttcgcaaccaggttggtatggtgcttcaagatacctttttatttagtgaaacgattcgggaaaatatcgcgatcggcaagcctgatgccacacttgaagagataatcgaagccgccaaagctgcaaatgcccatgaatttatcatgagttttccagaaggatatgagacccgggtgggggaacgaggcgttaagctttcaggcggacaaaagcagcggatctcaattgcgcgggtattcctgaaaaatccgccgctcctcattttagatgaagctacatcagctctggatttggaaagtgagcattacattcaagaagcgatggacaaactggcgaaggatagaacaacttttgttgtcgcccaccgtttatcgacaatcacccatgcggataagattgttgtcatggaaaacgggacaatcattgaaatcggaacccatgatgaactcatggactatgagagccaatacaagcacttatttaccattcaaaatttgaactaaaacatcaatcttatatccttttaacgaaggatataagatttttttgtatataaaaaaacccggctgtttaaccgggttactcttctgtttctatttcgcagtctttcggatgatacgtttgaaaacttgtgataagtgtttctaaatgttcaagctgctcgcgatattccacggcgcttgccataatattgagcatgttgtaatcaataagctcctcatccgtattctgctgattttttaaaaatgactttgttaaaagctgcttataccggatgccttcttcaaccgcgtcatcatgcggcttgatttttccgacaaacctcatcaaaatccgctcgtgccagtaaagcaggtaatcaagttcttcagtcaatgtttcctgaaactcttccggcatatgatagatctcgttttccagacgatgcagcttcttcaatgtatcaagcgcccgatttgcagtaataatggcctgtctgaacaggacaagctttcttgatttcacataagtcgttttcttaaagtaacttctttcttctttatatagaagatatgtctgatcaagcttgatcattttttctttcagtttttcaatatcctctttcaaaatcgaatgctctgtcgactgccgcatggacaatctgatccacttcataatttcttcggtgttttcgacggtattatgaatcagctttgtttcgtacttaggaggcaaaaacacaaggttgacgataaaggaagaaagcacccctaagatgactgtgcttgttctgatcagcgcgaacattaaaaagtcgtcaccggcagattctaatatcgcaatgactgttacaagagcaattgaaattgtatgttcaattttaagtttcagcatgattgtaatgacaataactgctgttaacccgatcataatcgggctgggtccgaaaataaggccgaacactgtggcaatcacagctccgatgatatttgcttgaacctggtcaataataatgagaaaagagcggtaaatcgacggctggatcgcaaatatcgctgcaattccagcgaaaatcggcgcgggaagcccgatccacgaagccaaataaagggcaagtgtaatcgcaatcccggttttgaaaatgcgggcaccaagtttcattggtttgtgcgtgcattcctttctatagtaaattgtgtgacatagcaaatgggctaatccttaaaattcccggttagtttatttgctaaacaattaagtaatatacagggatcgatacaaatattcaagctatttttctagaaaaagaccaaaatcttacacgctgtttgattccataaaaaaacaggagctcaaagctcctgttcaaggtatttgattctagttttttagatgtttaaatgcatcctcgaccgctgtaagcgtgtctttaatatcctgctctgtatgtgctgtggtaataaaccaagcttcatacttagaaggtgctaaattaattccgcgttccagcatcagcttgaaaaacgtagagaatgtttctccgtcactccgttcagcctgctcgtaattttccactttctcatcagagaagtataccgtgagcgcaccttttaaccggttgaccgtaatggtgatgccgtgtgtttctgcgtgcttcaaaatgccttcctcaagcatagcgccaaggtgatcaagcttttcatacacgcctttttctttgagcacttccagacaagcgatgcctgataggatggaagcggggttccctgccattgttcctgcctgataagcaggccctagcggagctacctgctccatgatttcttgtttgccgccataggccccaatcggaagtccgccgccgataattttcccgagtgctgttaaatctggtttcacctgtaagagatcctgcgcgccgccatacataaagcggaaagccgtaatgacttcatcgtaaataacgagagcccctgcattatgtgttaattcatttacttgttctaagaagccctctttcggctccacgataccgaagttgccgacaatcggttcaacgagaaccgccgcgatttcactgccccatttttcaagagctgctttatagctatcgatatcattaaatggtactgtgatcacttcgtttgcaatgcttttcggtacaccggctgagtctggtgtgccgagagtagacgggccggagcctgcggcgacaagcacaaggtccgaatgcccgtgatagcagcccgcaaatttaatgatttttgtccggcctgtatatgcgcgagccacgcggatggtcgtcataacggcttctgtacccgaattgacgaatcttactttgtccatagcgggaatggcttctttgagcatttttgcaaatgtaacctcgtgtttcgttggtgttccatacaatacaccgttctctgctgcttttttaatcgcttctgtaatatgcggatgggcatgtcctgtaataatcggaccgtacgccgctaaataatcgatgtatttgttgccgtccacatcccaaaaataagcgccgcttgctttctccattgcaacaggagaaccgccgccgactgctttatatgatctagacgggctgtttacaccgccgacaatgtgctgtaatgcctcattgtgaagttcaattgattttgtatgcaagaataaaaacctcctatatctccatgcgtcctttctattgtagcatgcttccgaacaagaacaatggcttcgggcttcagattcagctgagatggttgtaatctggacaagaattggatacgcttaataaaaaaacatccggaggtaacgtaatgactatagaaatcggacaaaaagcgcctgatcttgagttaaaaggtgatcatggggaaacagtaaaattatcggattataaaggaaagtacatcgtgctttatttttatccaaaggacatgacaccgggatgtacaactgaagcatgcgattttcgggacagtcacgaaagcttcgccgaactggatgccgtcattatcggcgtcagcccggacagccaggaaaaacacggaaaatttaaagagaagcataaccttccatttctgcttcttgttgatgacgagcataagctggcggaagcatttgatgtgtggaagctgaagaaaaacttcggaaaagagtatatgggaatcgagcgttccacttttttaattgataaagaaggccggctcattaaagaatggagaaaagtaaaagtaaaggaccatgtagccgaagcgcttcaaaccctcaaagatatgtctgaaaagtaaatctctatgagcctatgcttacttttaccctgatatcaattgacaaattatcgtagaaagagttacactaattataaacattacaatgtaagaattttttttagaagagaggtgcatgacggatggctgcacatgaactaaaagaagccttagaaacgttgaaggaaaccggagttcgcattactcctcaacgtcatgcgattctggaatatctcgttaactctatggctcatccaacagcggacgatatatataaagctctggaagggaaatttcctaacatgagcgtagcgacggtatataacaatttgcgtgtgttccgggaatcaggtttggtaaaagagctcacatacggtgatgcttccagcagattcgattttgtcacatccgatcactatcacgcgatttgcgaaaactgcggtaaaattgtggacttccactacccgggccttgatgaagtggagcagctcgctgcccacgtcacgggcttcaaggtaagccaccaccgtttagaaatttacggcgtctgccaagagtgttcgaaaaaagaaaatcattaaaaataagctgaccgcacgaaacggtcagcttattttatttcgacattttctttttattataagactcatcaaattcttttccttctaatcccttatctaaagtcagcggctctcggcaatgcatgcacatatcgactactcctaaaacctttgtctctttatcacagcctggacaaatgacgcgaaccgctttagtcgaaagcattccgatccaaaagtaaactaccgtgctgagaccgatggataaaagcccaagtatcataaacaaactagaaagcaaaactgactctttgaaaaagatcccgatgtacataatgataaacccaacgaaaaccaaacttaacgcaaatgttctgattttattaattttgctggagtatttcgccatgtccatccccctctgttttaactatagcacaaacccgatgggattttcttcatgttttcggttgaactggaatttacatatggagagttactgtgaaattgtttataatagttcaatgtgtttagaaaaaaggaatttcgttttaaccatagaattgaatcaaatagagaataaaaaaatttgaacaattgcattggaggaatagtgatggaaaatcttctccgtccaatttaccaagaaagagcaagtcaccccaatacattggctgtcattatgattgagagaagaaacaaaacatcttccttaacagataactttgatgcagctttgctggtgattgtaaaggatgctgatgagccagtttttataaagcattatgaatttgatcatcaaacagcttctttgcatgtggtaacagattctcagattcaagaatggattttgcttggaacaaatagaagaatcatagattggattgtaaatggcagagtcttgtttgaccgtaatgaatacgtagttgaactgattgacaggctgaatacatttccgtttgccgaacgtaaactgaagatcggactcgaatacggcaaattaatcagaaggtatgttgaagggaaagctttttttgaagccaatcaatttttagatgcctacaatgccgttgttcatgcgctgcatcatttagcacgtattgaagtaatcgacagaggattccatcccgaaaccacggtgtggagccaagtgcgccagatggagccccaagtgtacaaattatattccgagctgattgaaagtcatgagagcctggaaaaaagacttgaattattattcttagcaaatgattttctcatccattccaaagccgagatcggttcggcgcatcttttcgaagtaatgaaagaaaaagacatttggcaattcggtgagcttcttcaacatcatgacctaaagcactttacccaagatcttggcgttatgcttgattacttgacggaaaagggacttatcaacgtctgccagatagaaacgaaaggacaggctgtctatcaccgaggatattcttttaaaaaaggtgttgactctgattcttgaccgtgttatattattaaacgtcgctgatgcgcttctgagaaaacaagctcacagcggcgggaaaataaatcaaaaaaacatttgacaaaagaaagtcaaaatgttatattaataaagtcgcttcaacaagaagtgaaaatgatctttgaaaactaaacaagacaaaacgtacctgttaattcagtttttaaaaaatcgcacagcgatgtgcgtagtcagtcaaactagggcctgcacgacgcaggtcacacaggtgtcgccgcaggatgcggtgaacttaacctgtgatccatttatcggagagtttgatcctggctcaggacgaacgctggcggcgtgcctaatacatgcaagtcgagcggacagatgggagcttgctccctgatgttagcggcggacgggtgagtaacacgtgggtaacctgcctgtaagactgggataactccgggaaaccggggctaataccggatggttgtttgaaccgcatggttcaaacataaaaggtggcttcggctaccacttacagatggacccgcggcgcattagctagttggtgaggtaacggctcaccaaggcaacgatgcgtagccgacctgagagggtgatcggccacactgggactgagacacggcccagactcctacgggaggcagcagtagggaatcttccgcaatggacgaaagtctgacggagcaacgccgcgtgagtgatgaaggttttcggatcgtaaagctctgttgttagggaagaacaagtaccgttcgaatagggcggtaccttgacggtacctaaccagaaagccacggctaactacgtgccagcagccgcggtaatacgtaggtggcaagcgttgtccggaattattgggcgtaaagggctcgcaggcggtttcttaagtctgatgtgaaagcccccggctcaaccggggagggtcattggaaactggggaacttgagtgcagaagaggagagtggaattccacgtgtagcggtgaaatgcgtagagatgtggaggaacaccagtggcgaaggcgactctctggtctgtaactgacgctgaggagcgaaagcgtggggagcgaacaggattagataccctggtagtccacgccgtaaacgatgagtgctaagtgttagggggtttccgccccttagtgctgcagctaacgcattaagcactccgcctggggagtacggtcgcaagactgaaactcaaaggaattgacgggggcccgcacaagcggtggagcatgtggtttaattcgaagcaacgcgaagaaccttaccaggtcttgacatcctctgacaatcctagagataggacgtccccttcgggggcagagtgacaggtggtgcatggttgtcgtcagctcgtgtcgtgagatgttgggttaagtcccgcaacgagcgcaacccttgatcttagttgccagcattcagttgggcactctaaggtgactgccggtgacaaaccggaggaaggtggggatgacgtcaaatcatcatgccccttatgacctgggctacacacgtgctacaatggacagaacaaagggcagcgaaaccgcgaggttaagccaatcccacaaatctgttctcagttcggatcgcagtctgcaactcgactgcgtgaagctggaatcgctagtaatcgcggatcagcatgccgcggtgaatacgttcccgggccttgtacacaccgcccgtcacaccacgagagtttgtaacacccgaagtcggtgaggtaaccttttaggagccagccgccgaaggtgggacagatgattggggtgaagtcgtaacaaggtagccgtatcggaaggtgcggctggatcacctcctttctaaggatattatacggaatataagaccttgggtcttataaacagaacgttccctgtcttgtttagttttgaaggatcattccttcgaaacgtgttctttgaaaactagataacagtagacatcacattcaattagtaatacaagatatcacatagtgattctttttaacggttaagttagaaagggcgcacggtggatgccttggcactaggagccgatgaaggacgggacgaacaccgatatgcttcggggagctgtaagcaagctttgatccggagatttccgaatggggaaacccaccactcgtaatggagtggtatccatatctgaattcataggatatgagaaggcagacccggggaactgaaacatctaagtacccggaggaagagaaagcaaatgcgattccctgagtagcggcgagcgaaacgggattagcccaaaccaagaggcttgcctcttggggttgtaggacactctgtacggagttacaaaagaacgaggtagatgaagaggtctggaaaggcccgccataggaggtaacagccctgtagtcaaaacttcgttctctcctgagtggatcctgagtacggcggaacacgtgaaattccgtcggaatccgggaggaccatctcccaaggctaaatactccctagtgaccgatagtgaaccagtaccgtgagggaaaggtgaaaagcaccccggaaggggagtgaaagagatcctgaaaccgtgtgcctacaagtagtcagagcccgttaacgggtgatggcgtgccttttgtagaatgaaccggcgagttacgatcccgtgcaaggttaagcagaagatgcggagccgcagcgaaagcgagtctgaatagggcgcatgagtacgtggtcgtagacccgaaaccaggtgatctacccatgtccagggtgaagttcaggtaacactgaatggaggcccgaacccacgcacgttgaaaagtgcggggatgaggtgtgggtaggggtgaaatgccaatcgaacctggagatagctggttctctccgaaatagctttagggctagcctcaaggtaagagtcttggaggtagagcactgattggactaggggcccctaccgggttaccgaattcagtcaaactccgaatgccaatgacttatccttgggagtcagactgcgagtgataagatccgtagtcgaaagggaaacagcccagaccgccagctaaggtcccaaagtatacgttaagtggaaaaggatgtggagttgcttagacaaccaggatgttggcttagaagcagccaccatttaaagagtgcgtaatagctcactggtcgagtgactctgcgccgaaaatgtaccggggctaaacgtatcaccgaagctgcggactgttcttcgaacagtggtaggagagcgttctaagggctgtgaagccagaccggaaggactggtggagcgcttagaagtgagaatgccggtatgagtagcgaaagaggggtgagaatcccctccaccgaatgcctaaggtttcctgaggaaggctcgtccgctcagggttagtcgggacctaagccgaggccgaaaggcgtaggcgatggacaacaggttgatattcctgtaccacctcctcaccatttgagcaatggggggacgcaggaggatagggtaagcgcggtattggatatccgcgtccaagcagttaggctgggaaataggcaaatccgtttcccataaggctgagctgtgatggcgagcgaaatatagtagcgaagttcctgattccacactgccaagaaaagcctctagcgaggtgagaggtgcccgtaccgcaaaccgacacaggtaggcgaggagagaatcctaaggtgatcgagagaactctcgttaaggaactcggcaaaatgaccccgtaacttcgggagaaggggtgctctgttagggtgcaagcccgagagagccgcagtgaataggcccaggcgactgtttagcaaaaacacaggtctctgcgaagccgtaaggcgaagtataggggctgacgcctgcccggtgctggaaggttaagaggagcgcttagcgtaagcgaaggtgcgaattgaagccccagtaaacggcggccgtaactataacggtcctaaggtagcgaaattccttgtcgggtaagttccgacccgcacgaaaggcgcaacgatctgggcactgtctcaacgagagactcggtgaaattatagtacctgtgaagatgcaggttacccgcgacaggacggaaagaccccgtggagctttactgcagcctgatattgaatgttggtacagcttgtacaggataggtaggagccttggaaaccggagcgccagcttcggtggaggcatcggtgggatactaccctggctgtattgaccttctaacccgccgcccttatcgggcggggagacagtgtcaggtgggcagtttgactggggcggtcgcctcctaaaaggtaacggaggcgcccaaaggttccctcagaatggttggaaatcattcgcagagtgtaaaggcacaagggagcttgactgcgagacctacaagtcgagcagggacgaaagtcgggcttagtgatccggtggttccgcatggaagggccatcgctcaacggataaaagctaccccggggataacaggcttatctcccccaagagtccacatcgacggggaggtttggcacctcgatgtcggctcatcgcatcctggggctgtagtcggtcccaagggttgggctgttcgcccattaaagcggtacgcgagctgggttcagaacgtcgtgagacagttcggtccctatccgtcgcgggcgcaggaaatttgagaggagctgtccttagtacgagaggaccgggatggacgcaccgctggtgtaccagttgttctgccaagggcatcgctgggtagctatgtgcggacgggataagtgctgaaagcatctaagcatgaagcccccctcaagatgagatttcccattccgcaaggaagtaagatccctgaaagatgatcaggttgataggtctgaggtggaagtgtggcgacacatggagctgacagatactaatcgatcgagggcttaaccatatttttgaatgatgtcacacctgttatctagttttgagagaataagtttttcaaaaaaacacttgattttctcaagaatacatagtataatgttaaatgtcactgaaattgtctggtgatgatggcgaagaggtcacacccgttcccatgccgaacacggaagttaagctcttcagcgccgatggtagtcgggggtttccccctgtgagagtaggacatcgccaggcagacttcattccgcagtagctcagtggtagagctatcggctgttaaccgatcggtcgtaggttcgaatcctacctgcggagccattattggagagctgtccgagtggtcgaaggagcacgattggaaatcgtgtaggcggtcaactccgtctcaagggttcgaatcccttgctctccgccactgatacttatacataattacaattgaaagtctgggcccgttggtcaagcggttaagacaccgccctttcacggcggtaacacgggttcgaatcccgtacgggtcattatatgatggaggattagctcagctgggagagcatctgccttacaagcagagggtcggcggttcgagcccgtcatcctccaccattatatcatcgcggggtggagcagttcggtagctcgtcgggctcataacccgaaggtcgcaggttcaaatcctgcccccgcaaccaaattttaaaatggtccggtagttcagttggttagaatgcctgcctgtcacgcaggaggtcgcgggttcgagtcccgtccggaccgccatttgaatacttaggctcggtagctcagttggtagagcaacggactgaaaatccgtgtgtcggcggttcgattccgtcccgagccaccacctatgccggtgtagctcaattggtagagcaactgacttgtaatcagtaggttgggggttcaagtcctcttgccggcactgttttttcaaaatttaatgtggaggggtagcgaagtggctaaacgcggcggactgtaaatccgctccctcagggttcggcagttcgaatctgcccccctccaccatttataggggcatagtttaacggtagaacagaggtctccaaaacctccggtgtgggttcgattcctactgcccctgccaaatttatgacatcttgagattatggcggttgtggcgaagtggttaacgcaccagattgtggctctggcactcgtgggttcgattcccatcaatcgccccatattatcattgggctatagccaagcggtaaggcaacggactttgactccgtcatgcgttggttcgaatccagctagcccagtctcactttttatatcaactgcatataatgtattaagtccattaaaaatgcggaagtagttcagtggtagaacaccaccttgccaaggtgggggtcgcgggttcgaatcccgtcttccgctccaattacggcggcatagccaagtggtaaggcagaggtctgcaaaacctttatccccggttcgaatccgggtgtcgccttcttattgccggggtggtggaattggcagacacacaggacttaaaatcctgcggtaggtgactaccgtgccggttcaagtccggccctcggcaccaattttacttacatggtaagttgaattggtgtttgtgttttatcattataactaatcatattaatgatctacataagtagatcatttttttaatgctttgatttatcataacaagttaagttccgaggcctattataaagcggctgtatagctagtctttcaacacttttattttatatttccataaaaacttttttgaaatacgttgacactttatgagatccatgatatatttatattcgtcggttagatacgacgtaaaacttgccggtgtggcggaattggcagacgcgcacgactcaaaatcgtgttccttctggagtgtcggttcgaccccgaccaccggtatactgaaaaacccgtttcttaacagaaacgggtttttattttttattaaagaaaaggagcctcggctcctttttatacttactcagcgtattggtctaggatctcttctagcacctcttctagctcttctgtatcttcaagctctgattggctgaaacggacgcgtacaagctgttctccgtcattatacatctcttccaaccaccctcggagtcctcttgctctgcggtcgacttcgaaaatgatttccaaaccgtcttcgtctaaaaggaaaatgagctctaattcatcaagcatctgacgataatatccggaagtcggaacgaattcgaattcttgaacgaacggaagacgacgctggaagtagggcgcttgttcgcagtctgcttcgttaagacggaagcccaggttttcgattgcttcaagcacattttcaatccaagggtgcgcttcaacgaaaatgcggtcatgatcggatttatcgataccgccttgaatgtcaaggtctgtcaccacggcaacctctactttccctacagtgatcggcgtatctagaggcagagtgaatgtgaacggaaattgatgctcttcaccaggctgtatggtaaatgaaccagtgacccggaaagaatgaattgtagcgtatttccggtgctcttcatcgtcttttacaatgacataccgtgtgctaagctgtaaatcgatataacggatgtcctgagcgatttttccgcctttgacatgtaccgttccctgtacttcttctcctggaaaatatgcgtctttttctaaaattgtatctacttttgcagctccaattccggcacttgccgcaagcttcttaaaaaatgacatgttagatcttcccctttttcttttttctcaacagatatacgtaagaaggaggaaaaaagattcgtttgattcatacttttttcctattattcgtctcggcctagggacagactaagaataatattgaaaataaaggagtcgatggaagtgaataaagaaagtttggttgcagatgaattacacagaatgtttttggctggtgagctgcaaatcacagtagaggaggatataaacaatatttccgaaaggctgagaaacggcgatctcagtttagaccgattaagcggtgaagacgtgtttataaaagaaacggtaaatgaggctttaagaagagtggagcaataaaaaagagacggcatctcatctttgagatcccgtctctttttgtggtctttgctgtaagataaaagcgaatcgatttggaattgctcacccgagccaccccttttctaacagaagatctgacagttcatcatggagataaacagctgtatctaattgatcatgcaatgctcttctgatgtggggattttcggttgctgttgttgcgacagtgtatttgttaatgctggtttttattgttgttaacaaatcaagaatatctttgggacaaagactttgttcaatgggaaaccacctcctttgtttttttagcagctcctgataagaaagtatttgactttgtttcttgcttctatacaaaatgctataataagcaacaaattttgttggggggtgtgatgatgaagcagattattgcgatggggggcgggggtttttcgatggagccggataatttgtccctcgatcaatatatcctcaatcaatcaaaacgagagcagcctcgtatttgttttttgccgacggcgagcggagattcccaaaactatattcagcggttttatcatgcatttcaaacattggattgcgtgccgtctcatttatctttgtttaagccaccatcatcagatttagtttcttttgttatggaaatggacgtgatttatgttggcgggggaaatacgcggaatttacttgtgttatggaaagagtgggggctggaccatattctcagggaagcatggaagaacggtgtggttgtagctggaataagtgccggtgcgatctgctggtttgaagaaggggtgacagattcagccggaccgctgacaagtttgaaaagtttaggttttttgcaagggagcttttgtccccattatgacggggaaaaggatcggagaccggcataccaccagctgatatctaacaagttcttatgcagtggctatgcagcggatgatggggctgctctccatttcataaatgatcagctgtttcagactgtgagttcaaggtcgggtgcaaaggcatatcgggtgatgatggctgaacatgaaatagctgaaatcccgttgccggtcaaatatttagggtgaaattggctgaatattatctatattcctctttttttcagattgattttatgataagatgagtgcgaaatcaatagttactgggggtgcccgctttcgggctgagagagaaggcaagcttcttaaccctttggacctgatctggttcgtaccagcgtggggaagtagaggaattgtttttgttattgtcttgctgggcaataatatgtttctttctgactgtaaccgggttcatttatatgaatccggttttttgtgctggttatgggcttgattttgtcctttcaaacgtagaaaggggaaggaaaagtaatgcaaaacaattcagtgcagcaagccaacatttccattatgtcaagtttttcaggcagcaagaaggtatacgtggagggttcttcttcggacatccaagtgccgatgagggagattgcattgagtccgacgacgggatcgttcggcgaagaggaaaacgcgcctgtgcgtgtctatgatacaagcggaccgtatacggaccctgaagtaaccattaatattcaagaaggattaaagccgctccgccaaaaatggatcacagagcgcggtgacgtggaagagtatgaaggtcgggctataaaaccagaagataacggttataaaaaagcaaaaccaaacgtaagctatccaggattaaagcggaaaccgctgagggcgaaggcaggtcaaaatgtcacacaaatgcactatgcaaaaaaggggatcattacacctgagatggaatttatcgccattcgtgagcatgtgtctcctgaattcgtcagagacgaggtagccagcggccgggcgattattccttcaaacattaatcaccctgaaagtgagccaatgattatcggccggaattttcatgtgaagattaatgcaaatatcgggaattcagcggttacgtcatccattgaagaagaagtggaaaaaatgacgtgggccatccgctggggagcggatacgatgatggatctctctaccggaaaagatattcatacgacgcgtgaatggattatccgcaattgccccgtgcctgtgggaactgttccgatttatcaggcgcttgaaaaagtaaacggcgtagctgaggatttaacgtgggagatttatcgtgatacgctaatcgagcaggcagagcagggagtggattattttacgattcacgcgggtgttttgcttaggtatgtaccgctgactgccaaacggacaactggtatcgtgtcacgcgggggagcgattatggcgcagtggtgtctggctcatcatcaagaaagctttttatacacacattttgaagaaatatgtgagattatgaaaatgtatgatattgctttctctcttggggatggtttgcgtcccggatcaattgctgatgccaatgacgaagcgcagtttgctgaattagagacgcttggagagctgacgcaaattgcctggaagcatgatgttcaggtgatgattgagggtcctggacatgttccgatgcataaaatcaaagagaacgtcgataaacaaatggacatttgtaaagaagcgcctttttacacattggggccgttgacaacggatattgctccgggatatgaccatattacttcagcgatcggagcggcgatgatcggttggtacgggacagcaatgctttgttatgtaacgccgaaggagcatttggggctgccaaaccgtgatgatgttcgtgaaggagtcattacatataagatcgctgcgcacgctgcggaccttgcaaaagggcatcccggagcgcaaatccgggatgatgcgttatcgaaagcccgttttgaattccgctggcgggatcagtttaatttatctcttgatccggagagagcccttgaataccatgatgaaaccctgcctgctgaaggagcaaaaaccgctcacttttgttccatgtgcggtccgaaattttgcagcatgagaatttcacaggatattcgggattatgcgaagaaaaacgatctcagtgaagcagaagccataaataaaggattaaaagaaaaagcaaaagagtttgtcgatacgggaagcaatttatatcaataaaaaaaatgaagatggagaatgctccatcttcatttttttagaaaaacagagagcgtcgaagcggaggaatactctgttcaaagcggaaaacattttctggatcatatgtcgttttgacacggcggagtcgttcaacgttttcgccgtaatatgttcttggccagtttctgatttcgatatctggccaatttacgtagtctcccatcgtttctttcgaaagggacgttctcagcccctcaatccagcggacattttgtcttttttctccaggggatgtccagtttgttaagtattcctgggcgatgattgcgtcacgataataaaatgccgtttggtcgggagcgacccgtccggctgccccgccgagtgcttgctgccagacactggcgttttgattcggagcgtgctctaaaaagtgttttattgttgagatcgcacgttctgataatggcttttcaatgaaagagccggagcgtttcattttttgaggctgattgcctcccgggctgttaaaaaaggttaccgcttcaatgaatggcgttgtttttaccattccgcttgtcggacttcctgctttcaataaaggctttaacagtttttttaactctgtttttggcccgacaaattggccgagggcttctatgcggtttacttctttaggccaaaactctattgatgatgtaagccggtcatctgtatacggggcccagttctgccacgtgttatatacttcctcaaaatcatcccatccccatgtaatagaaaaaatcgacacttgagagatgggcactgctttaaatgtcatggaggtgactatgccgaaattgcctcctccgcctccctgagacgcccaaaataagtctggatgatttgaacagctgactgtaatcagatcagcgccctctttttcgtctgctacgatcatctcaagctgcacgaggctgtcgcaagtaagaccggcagcccttgttaaaagtccaattccccctccgagagttaaacctgtgagccctacattagcaatggtgcctgcgggaagcgtcaggccgtattgccagagtgtccgatagacttctcccaattcagcccccgcttcaatataggccagctttttatcctgattcacagttatttttttcatctcgcttaaatcaataacaagaccgttatttaaaagggaaaagttctcatagctgtgtctgccgcctctaatacggaaaggcacacggttttcacgcgcccatttcagcgcattgagtgcatcctgtttgttttggcaaaacacaatgatgtcaggatacctttctaagcttaggttaatattggttcttgcttcgttatagtccggatcatcccgtgtcacgatacgtccggtcaattttgtcttttccacactcccacatctctttctctcgtattctagtttctctagcttatgcgtcaggggaaaagagtgtataaggaaaaagcggggatgcaatctgatacagtgtcaacaccctcaaaaaatagttgacaggtcggtattgtatgaattaacatggtcagtacaaatttttcaaatttatcgcgctgatcggaacaccgaaggctcttatcgtttagataagggccttttttgtatgaaaaaggggggattattgatgggagtcaaaaaagaaaaggggagaaaacgattcaggaagcgaaaaacctacgggaatcagattttgccgcttgagctgctgattgaaaaaaacaaacgagagattataaacagcgcggaactcatggaagaaatttatatgaagattgatgagaagcatacgcaatgtgtaactaaatataaaaaaacccgctgactacaacgggtttttgcatttctccattaagaatcttttttaatcggcaatccaaggccttctgccacgcgttttccgtattcaggatccgctttgtagaagtgctcgatttggcgcagcttgatttcttctttttctaccggcttcatggcattaacgatattttcaacaaggcgggtacgttcatcttcactcattaaacgatacagatcgccggcttgagtgtagtgatcgtagtgatcgtagcttacgctgtcagcgataccttgtaccggatatgctgcttgcttatcctcaggtgactcttttggaccgccgaagctgttaggctcgtaatacacagatccgccgccgttatcatcaaaacgcatttgcccatcacgctgataattgtttactttgttgcgtgcgcggttgattggcagcgcttgatggtttgcaccgacacggtagcggtgtgcatcatgataagcaaaaagtcgaccttgaagcattttatccggtgaaacatcaataccaggcacgagggttccaggtgaaaatgtcgcttgttctacctctgcaaagtagttttccggatttctgtctagaaccatgcgtccgacctcgattaacgggtagtctttttgagaccaaacttttgtgacatcaaacggatcgaaacggtacgtatttgcatcttctaaaggcatgatttgcacatatagtttccatgcaggataatcaccgttttcgattgcgttgaaaaggtcttctgtatggtaatcagggttttcaccggcaatttttgctgccgtattgacatcaaggtttttcacgccttgttctgttttaaagtgatatttaatccatacgccttcgccttcggcatttgtccatttgaatgtatggcttccgaagccgtgcatgtggcgaagtgtcgcaggaattccgcggtcagacatcaggattgtcacttggtgcagtgactctggtgaaagtgaccagaaatcccatacagccgtagggtttttcaggtgtgtttttggatctcttttttgtgtatggatgaaatcagggaacttaatcgcatcgcggataaagaatacaggcgtattgttgccgacgatgtcgtagtttccttcttcagtataaaatttaacagcaaatccgcgcgggtcgcgaactgtgtcagcagagccaagttcaccggcaactgttgagaaacggatgaacaacggtgtgcgtttgccgacttcagaaaggaaagcggctttcgtgtattttgttacgtcgtttgtcacttcaaaatatccgtgtgcgcctgctcctttggcgtgaacaacacgttcaggaacacgttctcggttgaaatgggccaatttttcgagtaaatgtacatcttgaattaaagttggtccgcgagaaccggcagtcattgagttttgattatctccaaccggagcgccccagctagttgtcagtttatttgaactcatgttatcacctcttggaatttataagaacataatatcatctctaagtaaaaagtcaatattattttataattattataaaatagttatctctattaatcgatatatagtatcgaaattgttgaaaaaccttgttgtaacagctttttatgacacttaataatttttggagaaataatttttccttctctatttgcgaaacaagcagagtaagtgataaacaaggatatcaaaaatcgtatttaaaaaagagttgacatatcggaataatttgaattaacatgttattcaaacaaaaaaacaattgggcagctgatcggaccgccgaaggctctcatctctacaagaacagagatgggggcctttttgttttttttgaaggcggggttggcagaaagagagggataaaagtggctgtgaccatcagcatcaaagaaaaggcatttgttcaagaaggccgcaaaaacacggtcttagaaaacatagaattatcaatcgcaccaggcgaatttctaacgcttatcggaccgagcgggtgcggaaaaagcaccctgttaaagattattgcagggcttgattctgaatatgacgggagtgtggaaattaacggccgcagcgtaacagctccgggtattcagcaaggatttatttttcaggaacaccgcctctttccttggctgactgttgagcagaatattgcagccgacttgaatttgaaggacccaaaagtcaaacaaaaggtggatgaactgatcgagattgtcagattgaaaggatcggaaaaagcatatccgcgcgagctgtcaggcggcatgtcacaaagagtagccatcgcccgggccctgctgcgggagcctgaggtgctgcttttagatgaaccgtttggtgcactcgacgcttttacaagaaaacacctgcaggacgtgctgctggatatatggaggaagaaaaaaacaacgatgattctcgtgactcatgatatagatgaatctgtttatttaggaaatgagcttgcgatccttaaggccaaaccggggaaaatccataagctgatgcccattcacctggcgtatccgcgaaaccggacgactccggatttccaagcgatcagacagagagtgctgtcggaattcgagaaaacagaagatttggagtacgcagaaggatcagggatatagaaagggcggaagcggaaatgaaaaaaggactcattgtattggttgccgttatttttctgctcgcaggctgtggagcaaatggagccagcggtgaccacaaacaattgaaggaaattcgtattggtattcagcaaagcttaagcccccttttgattgcaaaagaaaaaggctggttcgaagatgcatttgaaaaagaaggcatcaaagtgaaatgggtggagtttcaaagcggtccgccccaatttgaaggccttgcggcagacaaacttgatttttctcaagtcggtaattcgcctgtgatcgctggacaggcggcaggcattgactttaaagaaatcggtttgtctcaggacggcttgaaagcaaacggcatccttgtcaatcaaaacagcggcattcaagacgttaagggcttaaaggggaagaaaattgcagtcgccaaaggcagcagcgggtttgattttttgtataaagcgcttgatcaagtggggttgtcagctaacgatgtgacaattattcagcttcagcctgatgaagcagcttccgcatttgaaaacggatctgttgatgcctggtccatttgggagccgtacttgtccttagaaacaatgaaacacggagcaaaaatccttgtgaacggagaaagcacagatttatattcaccgggttttactttagtaagaacaaagttttcagaagagcatccagacgaagtggtccgttttctgaaggtgtttaataaagccgttgtatggcaaaaggaacatctggatgaagcagcggacttatattctgacattaaagatctcgataaaaaggtcgtcgaaaatgtgctgaaaaatactgagccacttaatgagatcatcagtgacgacattgtgaaagcacagcaggaaacagcagattttcaatttcgaacaaaggcgatagataagaagattgatgtgaaggatgttgtcgataacacttttatcaaaaaagcattagaggagcattcctcaggaggtgatcaatgatgaaagcagaggctgcgggctcgctgcccaaaacgaatgcggaagcggtgcgaaaaaagcccggaaggaagagatacggctggatgaaggggcttttactgcccgctgtcatcattgccatctggcaggtcatcggcgggctgggggttgtgtccgctacagtgctgcctacacctgttacgattgttctgacctttaaggagcttattttgtccggcgaactgttcggccatctgcaaatcagcatttatcgggcggcacttggttttttgcttggcgcggggcttggattgatgatcgggattttggccggattttccaaacggacggagctgtatcttgatccgtcgttgcaaatgcttagaaccgtacctcatctggccgtcacgccgctgtttattttatggttcggatttgacgaagtatctaaaattttgctgattgcgctcggtgccttctttcctgtctatatcaatacgtttaacggcatccgcggggttgacgcgaagctgtttgaagtcgcccgggtgcttgaatttaaatggcatcagcagatatccaaagtgatattgccggcagccctgcccaatatattgctaggcattcgcttatcgctcggcattgcatggctcgggctcgttgtggcagagctgatgggctcaagctcgggagtcggctatatgatcatggatgcgagacagttttcacaaacgaataaagtctttgcagggattatcatttttgcagtggttggaaagctgacggattccttcgtcaggctgcttgaacgaaagctgttaaagtggagaaacagctacgaaggataaaagatataaaggggagatgaatatggaaattctttggtttataccgactcatggagacgcgagatatttaggatctgaaagtgatggacggactgcggatcatctttactttaaacaagtcgcgcaggcggcagacaggctgggatatacaggagttcttctgccaacgggaagatcgtgcgaggacccgtggcttacagcgtcggcactggcaggagaaacaaaggacttaaagtttttagtcgcggtaagacctggtttaatgcagccttctctggcagccagaatgacatccaccctagaccgcatttcagacggccggctgctgatcaacgttgtggcagggggcgatccgtatgagctggcaggcgatggcctgtttatcagccatgatgagcgctacgaggcaacagacgaatttttaaccgtttggcggagacttttgcagggagaaacggtttcctatgaaggaaagcatataaaagtggaaaacagcaatctgcttttcccgccgcagcaagagccgcatccgcccatctatttcggtggttcgtcacaggctggaattgaagctgccgcaaagcatacagacgtgtacttgacatggggtgagccgcctgaacaagtaaaagaaaagatagaaagagtcaaaaagcaagcggcaaaagaagggagatccgttcgatttggcattaggctgcatgtcattgcccgtgaaactgaacaagaggcatgggaagcggcagagcgcttgatcagccacttggatgatgacaccattgccaaagcgcaggcagctttgagccgttacgactcttcaggccagcagcggatggccgtccttcatcaaggcgatcggacgaagcttgaaatcagcccgaatctgtgggcggggatcggcctggtcagaggaggggcaggaacagctcttgtcggtgatccgcagacgattgccgaccggatagcggagtaccaggcactcggcatagaatcgtttatattctccggctatccgcatttagaagaagcgtattattttgcagagcttgtatttccgcttttgccgtttgaaaatgatcggacgagaaagcttcagaacaaaaggggagaagcggtaggaaacacttattttgtcaaagagaaaaatgcatgagtttaactaaaatacagccccccgaacatggtatgatattcaaaaaaagggggctttttttctgaaaacattgagaagcgcggcagtcatttgcctcatagctatgctgtcagcatgcggacattcaaaacagatggaaatcaaagcggcggacatatcagatcttgaaaaaaacagaatggatgtcgcagcttcacaggcattcactgccgaagccgtcaatatcggtgaaggtatttcttcagctgacatgtacatcgaacattatcaaaagggaaagcttgttgagaggtttggaccggttcgtgcagattattcagaggaaaaaactgataccatacaatttgtttattttgagaatgaagagggggaaggaaagaataaacataccaccattcattttggcattgtggataaacagggaactatagcggctgattcatcggtgaaacgcgacgatagcacaacacaggaaatgactcagaatatttcatcgccggaaccgattactttcgagaagcctgctttgatcggcagcagtattagagggactgacgagacaatgcacacctctgaacataaaaaagagctcattaagcatcaagatgcgttactgtattatgtggaattgcatcattagaatgggcggcttcaggccgtctgttttacaaagcggtatgcttgcttttttgaatggtgaatgatacattttaaatcgtaacaatttcgatttaaagggaggctatgtgacttggctaaaaaatcaaaagtggcaaaagagttaaaacgccaacagcttgttgagcaatacgctggtattagacgcgagttgaaggaaaaaggagattacgaggcactcagcaagctgccaagagattcagcaccgggaaggcttcacaaccgctgcatggtaacggggcgcccgagagcatatatgaggaagtttaaaatgtccagaatcgctttcagggagctggcccataaaggccagattcccggtgtgaaaaaagcaagctggtaagaaaaaactccggccgattacagcgcgccggagtttttttcgtttttcttgaaagagatgacgtaggaaaggtgctggatgatcatgatgataaacacaataataatagggaaaaacggaatgcgcgattgaaatagcggataaaaaatgagaagaaccgctgcggcaggcagcgagaagtagacagcgatatatgacgcgcgacatgcttttgccgtcatcatctgctctctttcatcctgctcttcaaactcatcaggcagaagtagctgctttctggcagggcggctttttttctgtaagtacaaataaaccgcagacgccgcaacaaacagaataaagggagtgaggtttaaatcaaataccatcccgccgctctttgtgccgaaaaaagatgctatgccttctgaggcttcaaagtatgaaatcagcgcccagcatgcaaggccaaataaaacaaggtgaaaagctgcttttgttttcatgctcatcttagttttcctcctctaaccaaaagacatcctccattttcatggagaaggctttgcagattttcagtgctaacagcagtgagggaacataatcgcctttttcaatcgctgccacagtctgtcttgtgacgccgaccgtttctccgagtttttcctgagaatagccgaagcgtgccctcagctcttttactttatttttcatcatgacgtctgtccccttcacaatctcgattgattatattgtatagtatacttaacattatgtaaatggaacttaacaactttacaaaaagataactttttttcgacaaaatttttatattcccttgacgaaaaataaataaacatgtaatataaaaaaagtcagagcggtactgttgctgacaatcacaaatgcgggtgtagtttagtggtaaaacctcagccttccaagctgatgtcgtgagttcgattctcatcacccgctccatacatacgttattaacgcagtgtttcgtttctcagataaacgaagtattgcgtttttttatgtgaaaaagaacacggtattcgtgttcttttacgtaagccaatgtactgtatgggtgccgccgtgaatttgttcaaacattttcgttaatgatgataagaggttaacagcgctgcttttctcaatcgatggcgggaaaaaaatgatttgcagcatattcttagtctcgtttgaaacgggatagtggttgacgctgtttttgaaatcgccaaaaatgccgttttcatcagagaaaagcagtatgttttctttttctcccaatgagatccggaccggctcatgaagctttccggcatcataaatcataataggcagagaatattttaatgcgaaaaaatcgattgtgtcatgggccgagtctttactttccatgaattgttccttggatatcgggaccagcatgtcctccattggggttgtttctccctcaaatgaagggttaagctgtttaaagagtttctgccattccttgacgaaggattcatcggatataccgccgtccgcatagtcgaaaaacaaggattcttgaaacaggcggagtctgcctttcagcatttgcggtgaggagccgacttcgatattctcataaatgacagcagctgcatgtaagccggccgcacgttcagtaataacagaatcaagtttgatattcactagcattcactccagttacgtgatatcaacctattataaacgctgtgtcgttttatcacaaagaaaggaggctgtgcaaaacatgaacgtttatcagctcaaagaagaattaattgaatacgcgaaaagcattggcgtagacaagattggttttacgaccgctgatacttttgacagtttaaaagaccgtttgattcttcaagaatcactcggctatctctccggctttgaagagccagatatcgaaaaaagggtgacgccgaagcttcttttgccgaaagcgaaatcaatagtggcaattgctctcgcatatccttccagaatgaaggatgcgccgagaagcacgagaactgagcgcaggggcattttttgcagagcttcctggggaaaagactatcatgatgtgctgagggaaaagcttgatctgctggaggattttctaaaaagcaagcatgaggatatcagaacgaagtcaatggttgatacaggtgaattgtctgatcgcgccgttgcggaacgtgccggaatcggattcagtgcgaaaaactgtatgatcacaacacccgagtatggctcttatgtgtatttggcggaaatgatcacaaatatcccttttgagcctgatgtgccgattgaagatatgtgcgggtcctgcacgaaatgcttggacgcctgcccaacgggagcactggttaatcccgggcagcttaatgcgcagcgctgcatctcttttctgacccagacaaaaggatttttgcctgatgaattccggacaaaaatcggaaaccgcctgtacgggtgcgatacgtgccaaacggtatgccctctcaataaagggaaggattttcatcttcatccggaaatggagcctgatcctgagattgccaaaccgttattgaagccgcttttggccatcagcaatcgggaatttaaggagaaattcgggcatgtctcaggttcttggcgcggaaaaaaaccgattcagcgaaacgccattctcgcgcttgcccattttaaggatgcttccgcactgcctgaattgacggaactgatgcacaaggatccgcgtcctgtcatcagggggacagccgcatgggcaatcggaaaaatcggagaccccgcctacgcggaagagcttgaaaaagcgctggaaaaagagaaggatgaagaggcaaagctggaaattgaaaaaggaattgagttgctaaaagcttcaggcatgactaaacaaggcctgtcctgacatacgtatagagcagaaggaaaaaacacttgagatcatccaagtgttttttctctataaaaaagtatggcgggtggggtgagcttgaagtacattttagaacaattagcggaggagcggctgggctttctggttaacgggcatgctatgagacaggagtctcaagtcggagaccttaaagtcatggagcgtaagaaaaagcttctggaaaaacgtaaagttgacatcataaaagcgaaagcaaaggccgtgattaatcatgtgcgggttgaggatgacggaacgacctgcctttcgtataccatccattacgaatacgtgtgtaaggaacaagatgacagcttgtatatagaagagcacatagaggagcgaatggctttcctgtatgatcacattttgattagtgatcaggaaattgcgaaaaagccggctggatttcatgaagggaccagtattattgactattctgaagctgaagaggaaagagaagcgtttggcagggcttttcaatacgatcgtctcggcgctgtccaatatgccgagaaattttggaacaagcgcaatcctgcttataaaaatttcagcgataactgtacaaattttatttctcagtgtcttcatgcaggaggcgcgccgatgcgcggtcatccgaacaggggatcaggctggtggatgaaacaaagctcatggagctacagctggacggtggctcactctatgaaaatgtatttgtcgaattcaaaggccggactgcgtgcggtgcgggtgaaatcagcggaagaactgatgccgggcgatgtgatttgctatgacttcgaaggagacggccggtttaatcatacaacgattgtcgtggcaaaggacaaaggcaatatgccgcttgtcaacgcccagacttatgacagcaggatgaggtattggtcatatgaggattctacggcatacacgccgtcaatacgatatgccttttttcatatcgttgatgatacgacaaaagagtaattaatgttataatgatgggcggataagaaaaacagaggtgaacattgtggcattacatgtcgttttatatcaaccagaaattcccgctaacacagggaatattgcacgtacttgtgcagcaaccaatacaacgctacacctgattcgtccgctcggcttttcaacggatgataaaatgctgaagcgtgccggactcgattattgggagtttgttaacgttgtgtatcatgattcgttagaagaattgtttgaggcatataaaaaaggcaagtttttctttattacaaaatttggccagcagcctcatacatcatttgattacactgatcttgacgaggattatttcttcgtgttcggaagagaaacaagcggtttgccaaaggatttaattcaaaataatatggaccgctgcctgcgtcttccgatgacagagcatgtcagatcgttaaatctgtccaatactgccgcgattcttgtttatgaagcgctgcgccagcaaaattaccgtgatttaaaatagtgaaaaacccgctcatcgatgatgggcgggtttttttgcggatgttgaaatgctttgtttcgtttttgggcttaacaacgtaacagtgttatgttacaatgtacccatcaaaggagctggacttatggaagaacaattaatctctaaaaaagaattacttgaaagaacatcgatttcatacggtcagctgtatcgatggaagcggaaaaacttaatacctgaggaatggtttattcgtaaatccacatttacagggcaagagacgttttttccgagagaggagattttaaaacgtatatcaatgattcaaaagatgaaagaaaatttgtctttggatgaaatgagggaaatgctgtcgccgaaaatgaaggatgtcagcatgaccgctgatgaattgcttcataaaggtttggtttcaaggcctgctcttgaagcctattcagaagacggaggaagtccggttttttcatccagcgatttgctttcgctgtttgtgcttgagggcctgctgcagtctggaaatgtcagccttgcagaagcaaaaatggctgcagaggtattaaagaagcatgatactgaagagattgaaaaacagacggagctgattgtgctccgcaagctcggtgtcacaacttgttttatagcggctgcggcggacagcattttgtttgaatcatccgtaaaggttgtggaacgggtagatttattaaaagcttcagaggaattaaaaacaacatttatgcaggagggccatcaatggatgtagtggaaaagctggtgataaatggatcaggaagttctaagggaggaacatttcaatcagttgagattaatggcagcgggacagtggccggggacgtggagtgtgacactttttcttttaatggaaacggaaaagcggacggcagcgtcaaagcgaaagcggtaactatcagcggttcaggaaagatacatggagacgttgaagcagaatctatccggatgaatggcactggttttattcaaggagaggtatctgcaaaacaattgaaaatcgctggatcatcaacatttggcggcactgtcaaggctgatggaattgacattagcggaaaagctgtcatggaagcagattgtgaaacagaaacctttcaatcagaagggaaatgcaaaatcagcgggcttttaaatgcagaccaggtgatcattaagctttctgcaggggaaagctatgcgcgggagatcggctgccgccatcttcaagtgacctgcagaaaaggaatgctgacattgctcagattgatgccgcagcctgttctaacagcagagctgatcgaaggtgacgtgattgaattgacaaatacaaaggcgaaaaccgtgcgcggtaataaagtgatcatcggcccggattgccagattgaaaccgtcgaatacagcggggactatacctgtgatccaagcgcgtcggttgaaacatccacaaagttgtaaggaggatcgtaatggagacaacaaaactgggaaatttaaaattatatggcgctgggcatgccgcaggaggcgcgtatcacaatgtcagcatcaaaggagaaggtatagttggagaagggctgtctgctgtaggctgccgcatatacggaacgggcctttttctcggaaaagcagagactgagcggctgcgtgtgctcggagaaagtgaatgtaaaggcgatctgacagccggcaaaatcaatatatatgggacaatgaaagtcagcggctcacttcaatttgatcgattcaatctgaaaggccagactgaaattggcgggaatatgactggagaatcctgcgatgtgaaagggaagcttagcgtaataggtgattgtgaaacagaaatgttccatgtcacaggctgtgttgatgtatcggggttattaaattcgggtgagatcaagctgggattgagccatgatataagccatgtgcaggaaatcggcggaacaacaattacagtgaaaagacgcgcgagtttttttagccggaagaaagggaagctgatcgccgatgtcatagaaggagatcgggtttatttggagaataccgaagcggcagttgtcaggggaaaagaagtgatcatcgggccgggatgcagcatcggaacgattgagtacgaatacaaatgtgaatgcgatccgcattcacagattaaagaaaaaacaaaactgtaaaacattgttctgttatacaaaaagggtgctctttcaggagcacccttttttattcttttccaggcttgctttcgtatcctgcggtaaaaattgatactaaaaaagtgacaatgacacccatcatgatgattgttttcaccgtctctccccctcttcaatttttccgtgctgtccgagtctggatgattctgtatttttctttattatgaacggtcgcagtctgccttgtcaacgatgtatgagtatctttatttttaagaaaccaaagcatgtatcacgagatggcggcatagattgtatcaaagtaccttatttgcatagtgtatcaaacatgatagaggaggtccttatggatatattaaagaaaattgaaaagtacagagaggaagagcagcggctgaaatgggaaggaactttcgccgattatttggagattattaaagaaaatccgatggtcgcgcaatctgctcattctcgagtttttaatatgataaaagacagcgggatagaggagattgacggacgcaagaagtacagtttttttgaccgcgagctgttcgggcttgaagaatctctggagcgtcttgtggaagagtattttcatccggctgccaaacgtctagatgtcagaaagcggattctattgctgatggggcctgtgagcggcggtaaatccacgctggtcacaatgcttaaaaaaggtctcgaagcgtacacgctgacagataatggcgctgtatatgcgattaaaggctgcccgatgcacgaggaccctctacatttaatcccccatcatttacgcgatgacttttacagagaatacggcattagaatagaaggaagtctttctcctttaaatgtcatgaggctggaggaagagtacggaggaagaattgaggatgtgaaggtggagcgcatcttcttttcagaagataagcgtacgggaattggaacattcagtccctctgatccgaaatctcaggatattgccgatttgacggggagtattgatttctcaacaatcgccgagtacggttcagaatcagatccgcgcgcttatcgatttgacggagagctgaataaagcgaaccgcgggatgatggagtttcaggagatgctgaaatgtgatgagaaatttctctggcatttgctttccttgacacaggaagggaattttaaagctgggcggtttgcgttaatttctgctgatgagctgatcgtggctcacacgaatgaaacggagtatcgctcatttatttctaataagaagaatgaagccctgcactcaagaatcatcgtgatgccggttccttataatttaaaagtgtctgaggaagagagaatttatgaaaaaatgattgcagaaagcgatgtggcggatgttcatattgccccgcatacgttgaaggtcgccgcgatgttctcaatccttacccggttaaaagagccgaagcggtcggatattgatctggtcaagaaaatgagactgtatgatggggaaagtgtggaaggatataactctgtcgacgttgaggatatgaaaaaagaatataatgatgaaggcatgagcggaattgatccgcggtacgtgatcaaccggatttcttcaacgattatcagaaaaaatatggaatcgattaattctctcgatgtccttcgctccttaaaagaaggtcttgatcagcacccatcaatttcaagcgaggacagggagcggtatttgaattttatctctgccgcccgcaaggaatatgacgatattgcgaaaaaggaagttcaaaaagcgtttgtttattcatatgaagaatcagcaaaaacacttatggacaattacctcgataacgtagaggcctattgcaataaaaacaagcttcgtgatcctttgacaggagaggaaatgaaccctgacgaaaagctgatgagatccatcgaagagcagatcggcatttcggaaaacgccaaaaaagcgttccgcgaagaaattttaatccgcatctcggcctatgcgagaaaaggcaagcggtttgattacaattcccatgaaagactgcgtgaagctattcagaaaaagctgtttgctgatctgaaggatgtcgttaaaattacgacctcaacaaaaacgccggatgagcagcagctgaaaaaggtaaatgaagtcgtggcccgtttaattgatgagcacggctacaactcgacgagcgccaatgagctgctgaaatatgtcggcagcctgctgaaccgataagcaacgtgacccgtccgaatagggcgggttattttgtcccattttctaaatagtttgtcaattaaacgtgcatatgtgcatatgatgaatataaatcttttcaaaagacttgtttcataatctggcacaagccggaatacgtatgtatcacgaccacaaatggttaaggaggggaattcatgtcccaaaatgacagcggccattttttgatttctgaggaaaactggtccctccatcgcaaaggcttcgatgaccagcagcgccaccagaaaaaagtgcaggaagcgatcaaaaacaatcttccggacctcgtaactgaggaaagcattattatgtctaatggaaaagatgtagtgaagatcccaatccgttcacttgatgagtataaaatccgttataactatgataaaaataaacatgtagggcaaggagacggcgagagccaggttggagatgttgtggcccgggatggatcagacaaaaaacaagggcctggaaaagggcagggtgccggtgatcaggcaggcgaggattattatgaagcggaagtttcattaatggatttagaagaagcgctttttaaagaattagagcttccgaatctccagcaaaaagagcgggacaatatcattcatacagatatcgagtttaatgatatccgtaaaacagggttaaccggtaatattgataagaaaagaacgatgatgtcagcctttaaacgaaacgcaatgtcaggaaaaccgtcgttctacccaatttatccggaggacctgaaatataagacgtggaatgacatcacaaagcccgaatcaaaagccgtcgttttagccatgatggatacaagcggcagtatgggggtttgggaaaaatacatggccagaagcttctttttctggatgacccgttttttgcggacaaaatacgagactgtggaaattgaatttattgcccatcatacagaagcaagagtggtctcggaggaggattttttctcaaagggagaaagcggcggaacaatttgttcttccgtatatcggaagtcgcttgagcttattgatgaaaagtacaatcccgcccgctataacatttacccgtttcatttttctgacggtgacaacctgacatctgataacgcgcgctgtgtgaagctggtcaatgatattatgaagaaggccaatctgttttgctacggcgaggtcaatcagtacaacaggcattcaacgttaatgtctgcatataaaaatgtaaaagatgagaaatttaagtactatattttaaaacagaaatctgatgtttttcaggctctaaagaactttttcagaaatgaagagtctggtgtaagccatcaattttcgtaatgaaaagcccatttcagggcttttttttatttaataaaagcaagaaaacgcttgcgaaaaaaatacgggagaaaaagaaatttttcctttgacaaatcttctttcatttattaatattttatcttgtgaactattattgaggaatgaggtgaaaaggagttgactgaatcagaacgtgctttgctcacttttgaacagctcttcgatacgtctcgggcgatatataaaaaacagaagaagatattggagattgtgcttgagccttttgatattacagtccttcaatatttgctgatgtttaaaattcatcaaagcggaagcaccccgctaagcaagctggcaatgtcgcttgatcttaagcctgcttctgtgacgcggatgacagatattctgtataagcgccaattgatgaatcgatatgacagtccggatgaccgccgtatcgtcatgattcagttaaccgaagagggggaagaactgatagaaaaagccgctgtgcaatatgcaaaaatgggtgctggcttgtaccaaaagcttgatacctcccagctgcagtatttgcgcaaactagccggaagtttaacgaagcttgctgaaggctgttcagaaaaaagcggtaattaaaaacttctcacatattttcaccagctttccgcaaaatgatagaggatgaaacgaaaggagaaaacaaaatgaacagaggacgtttaattctgaccaacattatcggtttgattgttgttcttgcaattatagctggaggtgcttactactattatcaaagcacaaactacgtaaaaacagatgaagcaaaagtagcgggcgatatggctgctattactgctccagcagcaggtaaagtatctgactgggatctggacgaaggaaaaacagtgaaaaaaggcgacacagttgcaaaaatcaaaggtgaacaaactgttgacgtaaaatccattatggatggcacaattgtgaaaaacgaagtgaaaaacggacaaaccgtacaagctggtacaacaattgcacaaacgattgacatggacaacctatacatcacagcaaatattaaagaaacagatattgcggatattgaagtaggaaatagtgtagacgtagtagttgacggagaccctgatactacatttgacggtactgtagaagaaattggttatgcgactaactcaacttttgatatgcttccttctacaaattcaagcggaaactacacaaaagtaacacaaaaagttcctgtgaaaatttcaatcaaaaacccatctgataaggtgcttcctggaatgaatgcatctgttaaaatttctgagtaaaacagatcagtcatcaaaccatgaaaggaggttgtcttagatggctacaggcaaagaaaaaaatgcaaaaaaccctatgtcattgctgattgtgctaatggcgggtttatttttggcaattctaaaccaaacactgcttaatgttgcaatgccgcacttaatgactgaatttggcgtaagtgcaacgacgattcagtggctgacaacaggttacatgcttgttaacggtgtattgattccgttatctgctttcctgattacacgatttggccagcggagtctctttctcgtcgcgatgttttgttttacgctcggtacgttagtctgcggtatcgcacctaacttctctacaatgctgatcggccgtttgattcaggccgtgggcggaggtatcttgcagccgctcgttatgacaaccattctgttaattttcccgcctgaaagcagggggaaaggaatggggattttcgggctagcgatgatgtttgctccagcggtcggcccgactctttccgggtggattattgagcattatacatggcgcattatgttttacggacttgtgccgatcggcgcaattgttatcattgtggctttcttcatctttaaaaatatggtggagccgcaaaaaatcaaactcgatactcttggcgcaatcctctcgattgtcggattcgcctccttattatacggagtcagtgaagccggatctgacggctggaccgacccgattgtattgtctacagttattatcggagccattgcaattgttgcttttgttgttcagcaattgcgtcatgatgatccgatgcttgatttcagagtgtttaaatatgacattttctcactctcgagtgtcattaatatcattattacagtggcactttacactggtatgttccttttaccgatttatctgcaaaacctggtcggctttacggcgcttcaatccggtctgcttctgcttccgggtgcgatcgttatgctgattatgtcaccgatctcaggtattttgttcgataaattcggaccgagaccgcttgcgattatcgggcttctcgtgacagtggtaacaacgtatcaatacacgcaattgacaattgatacaccatatacacacatcatgctgatctattcaattcgtgcatttggtatgtctctcttaatgatgccagtcatgacagccgggatgaaccagcttcctgcccgtctgaacagccacggaacggcgatgagtaacacgcttcgccaaatcagcggatcaatcggaacaagtttaattacgacgatttatacaaaccggacgacattccattattcacaaattgcagataaaacaagcacggcggacccgaacttcctccatgcgttccaaaatgcagtttcgaatttaatggtgaatatgaatgtgtcttatgatacggcgaaaacatatgtgtactcacatatttataaacacgcatcactcgattccaatgtcatggggataaatgatgcctttatgtgggcaaccttattctgtgtagcaggtttgattttaagtatcttcctgcgtgacgtcagaaaagataaattgcgtaagaagaaaaaagaggagctttcattacttcctgctccaaaagaagctaaggaatcttaatctgtacagggaggtttcctgaatgaaaatttatgtagtgtatgatagtgaaggcgaacatactaaagtgcttgcagaagcgattgctgaaggcgcgagagaaaacgacgcggctgaagtgttcatcgaccatgtagatcaggctgatatccgcaagcttaaagatatggatgcgattatttggggatgcccagggcatttcggaacaatcagctccggtcttaaaacttggatcgacagacttggctacttgtgggctgaaggcgagctgatcaacaaagtcggtgctgtcttctgcacaacggcaacaacacacggcggcttggaaatgacaatgcacaatttaatcacgccgatgttccaccaaggcatgattgttgtcggactgcctggcaacgtgcctgaaaacgcactttatggctcttattacggagcaggtgtcacttgtccggtagacagtgatgagttaatgtctgaggaaggtattcagcttggacgcgcgttgggaagacgtgtcagccaagtcacaggaaacctaacagcaggacagtaaggagaggttgaaatggccattattatagcaataattgctgctgtcattgtcattgcggcccttattacatttaacgtccgcaacgcctcacctggacctgagaagcaagaagcaaccgatagaatcgcacctccagaagaggaaaaaaacgaagcgcattaccctgctgaagcaagggctgccgagcatacgccatccgttgtcaaaaacgattctccaaaagagaagcgtgacacaatgggtgatgatatttacaggcaggcgctgcaaaagtttaagcattctgatgaagttcatgcagaagaagaggtcactgaggaaagtgacaaaatgcaggaccgcagctatcgtgatgcgctgctctctatgaaaaataagaaaaagtaatgaaaaaggcaaatccgtttactcatgcgggtttgccttttttgctgtttccatcaattatgtttttatcaaataaatccatggaatatgttgtattccaccttgatctagtgtactatgttactcatacaccgaggattttttccgggaggtaaagacatgaattcttttttaggtttattaaagaaagatatcaagctttcaagaatgtggctgctagtatggatatgcggaatcattttcttattgggaacaggccatattatagcttctcgcacgaaagaacctctagtcatttttggtttttttgttgcagttgctttttttctgcttttcttatctcctgtttttgttttttatcaccttcgcaaggaagggaaatcacagctttggctgtacaatccaaatggcggcttatggctgttttcttctaaattggcagcatctttgctctatcaatttgtgattcagttggcattaacagcctatggcatatggatgtatcatatgctctctgtaaaaaatctgctggagcatcaagttgatataacgagtacagtggctttgctgaatatgtatgggcttatttcttcgttagatatgtcagtaacagtcattgtgttttggactgtttttcactctctcagaaattggcgcggaatgcggtgggctgcgatggttctgttggtcgcaatgtggttattcttcgatgaatacatcataagccctttggttgaatctcaaaagcatttctggcctgtaacagtctattgcaattttgatttccacttccacaatgtttggagattggaactaaaacctatccatctgtctgtgctagggtttcctattgctatagtcatcacattcttgctgctcatcatggcttcaaaactgcttgatcgtaaagtagaggtgtaaatatggacaatcaattccaatcctcgaaaccgatttatctgcagatcgctgatcagatcttttataggctggtcaggaaggagctgctcccaggagacaagcttccttcagtaagagaaatggcgattcaaactaaagtaaatcccaatacaattcaaagaacttacagtgagatggaaaggctgggtattgtggagacaagaagaggtcaagggacgtttattgcggaaaaagcagaaatcgtagacgagctgaaagacaagctgacacgagaggtgctggaaggctttgtcaagcaaatgaaagagctggggctaacgaaagaagaaatgttagaagggattaaaacattcacagagggaggctaaaatggaaatcaagctagaacatgtatcaaaaaaatacggccgccatacggccgtcaatgatgtgtcaatcaccctatcatccggacggatttatggcctgattggaccgaacggcagcggcaagtcaacgaccctgaaaatgatggctggccttctgtttccgacttcaggatttgtaaaagttgatgaagagcaggttacgagagaaatggtgcgtcaaacggcttatcttactgagcttgatatgttttatccgcatttcactgttaaagatatggtgaatttttatcagtcgcagtttcctgattttcatacagaacaggtttataagctattgaatgagatgcagctgaatccggaaaaaaagatcaaaaagctatcaaaaggaaatcggggcaggctgaaaatcgttcttgctttagcgagacgggcagacgtcatcttgcttgatgaacctttttccgggcttgatccgatggtcagggattccatcgtaaacagccttgtgtcgtacattgattttgagcagcagattgtcgtgatcgcgacacatgaaattgatgaaattgagactttgttagatgaagtaatcatcctcgccaatggagaaaaagttgcgcagcgtgaagtagaagatattcgtgaacaggaaggcatgtctgttttgcaatggtttaaatcaaaaatggaagtttgctagaaagaggaggaatatgatgaaaacagtgttggaattgaaaaacgtgactaaaaacatcagaggccgaacgatcattgatgatctcagttttacgattcgtgaaggcgaggtattcggttttttaggaccaaacggagcggggaaaacgacaaccatccggatgatggtggggttaatgaagctgtcgaaaggtgatgtcctcatttgcggccaatcaattacgaaagaatatgccaaggcgattaagcatatcggagcgatcgttgagaatcccgagctgtataaatttttgagcggatataaaaatctccagcaattcgcaaggatggtcaagggtgtcacgaaggaaaaaattgatgaagttgttgaactggtcggtttaacagacagaatccacgacaaggtgaaaacatattctctggggatgagacagcgtcttggcttggcacaatgccttctgcacgatccgaaagtgctgattttggatgaaccgacaaacggccttgatccggcggggatcagagaaatcagagatcatttaaagaagctgacccgagaaagaggaatggctgtcatcgtttcaagccacctgctgtcagaaatggaactgatgtgtgatcgaattgcgattctgcaaaaaggaaagctgatcgatattcaaaatgtaaaagatgaaaacattgatgagaatgatacatatttcttccaggttgagcagccgagtgaagccgctactgttttaaatcagtacgatttgctgagtaagacaaatggtgtagaaatcaaactggctaaagaggaagtccctgcggttattgaattgctggtgatgcagcaaatccgtatttatgaggtcaaggtcataacaaaatcattagaggaccgtttcttagaaatgacaggtgaaacaaaagaggaggttcagcatgcttaatttgatttataatgagtggctcaaaattttcagccgtgccggaacatgggtgatgatcggaattctggggctgacaatggttggatttgcatttttggcgaatcatttttctgccggtgaatcaaattcccattggaaacaagagcttcaagcacaaaacgccgaattaaagaaagaaatcaaagaagatccttcactgaaagatgggtataaagaaacaatcacactcaatgactatcgcatcgagcataatatccctagtgacacgggctatacggtatggtcttatgtaacggattcagcaaactttaccatccttaccggtctgtttactattatcatcgcggccggaattgtcgcgaacgaatttaattggggaacgattaagctattaatgattcggccgctcagtcgttttcaaattttgatgtccaaatatattacagttctcctgtttgggctcctgttgctgttgattttatttatcggttctactttattagggttgatcttcttcggaacgggtggtgaaaccgccgcgaatattcatttaatctataaggatggccatgtcattgagcaaaacatgatggggcatttggctacaacgtatctttctgaatccgtctcggctttaatggtggcgacgatggcgtttatgctgtctgcggtattcagaaacagctctcttgcggttggtttttccatcttcttgttggttgccggtacgactgcaactgcatttattgcagcgaaatttgactgggcaaagtatatattgtttgctaatgtcgacttgactcagtatgtggatggcacaccgttaataaaagggatgactatgacgttttctctcgtcatgctggcgatctactttatcatcttcctgttgcttgctttcggaatcttcatgaagcgggatattgcaaactaataaaaaaagctgttttgcttatgcaaaacagcttttttgtcaaaataaaaactgcaggtttgcacctgcagtttttcatatcaatttatgcttacgcttctttagtaacgttagcagcttgtggtccgcggtttccttcaacgatttcaaaagaaacagcttggccttcttctaaagttttgaagccttcgccttgaatagcagagaaatgaacgaatacatcgtcttgaccttctacttcgatgaatccgaaacctttttcagagttgaaccattttactttaccttctaacatgaaatttcctcctaaagcgatcataacgcttaaattcactattcttgctcttaacaaactttcaagacgaaaactcttacaaaactttcttcttaaagatagttcgaacaaaaataattacctttactctaccagtaatcttcagaaaaaacaactgcttattgaaatttttttcggaaaataccatatttatttttcaatttgatatttatttacggaaattcatctgttttctcgatatgtgatcatacgtttgccttagtattccttcattttgggaagataagtaataggaattgacaaccttattggatatgagtaaggtaaaagttaatcaatattacaaatgacaacgtttatcaactaagagagcgtatgatttttatgtctgatattgcttgcatgctctaatacatagataggagtatggtcacaatgaaaaagtggcttatatgcagtttcgtccttgttcttctcgtttcatttactgcatgttcaccgtctgcagaacatgaatcgataaaaatcgggattgctgagtctgacggggcaatatggaactatattgctcaaaaggctgaagaggcagggctggatattcagctgatccctttttctgattatgcggagtctgatatcgcacttgctaacaaagaaattgatgccaacgcctttcaaaccatttcatattttcagtcgttcactgaaaaatacaaacttaatttggcaccgctcgggacgacatacataacgcccatgggcatttattcaaaacgatatgaacgaatccgagatatatcgcggggagctgtcgtttctgttccggataaagcgttcgattttggcagggcgcttacggtgctccaggaagcgggtttgctaacgctgaaaaacggatttaacggaacaggttcagttgatatgattaaagataatccgagacacctgaaattaaaagctgtccggcaacaggatgcagtgagcggtgccgacgtgtttgtcatgaaaccatcagaagcaaaaaaagcgggcttgaacccgaaaaagcatacgctaaagagcggcggactcatgtctgaggaagagatgaatttgattgttgtcagagcggaggatcaagatcgggaagcgctgcaaaccattcttgagctttatcaagctgatgatacagcggcatttatagaaaaagaatatcagggagatcttgtcccggcttttctgcctttgaaacgtctttcagattggaagaatgaattcgaacattgaattcattcttttttttctgaaaaacacactctgttccgtcccgtttctttcgctttgtaaagcatttgatcggcaagaatgggcaaggatcctggctgttccgtattattggggtaatgagcggcccctagtgatatcgtaactgaaagctcgtcgccgtttgttaatacaatcggtgcatcacttacagtgctcctgatccgttcagcgatccgggctgctttatcaagagaacagttcggcaggagcacggcaaattcttcaccgccgatccgagcggcaggatcagtatttcggatggtctgcttcagacgtaaccctagctctttgagcacctgatctccttcatgatggccatattggtcattgatggtcttaaaatgatcgatatccatataaatcagtgcaaattgaaaatgcggggtatcggccgcctgctgatacagagcttttgtggtttcttcaaattttcttcggttatacacgcctgttaaaaagtcaaagtgcgcctgaaacttatattgtttaaaaagaagatgtgcatttgtttcatgatcaataatatataaactgagcatgccgcccgctattgatatgatccaaaaatacaaatgaagttcgtatgaatgtaaatctataagaaaataaaaggaaaaggagatcaagctatttgtgattattaaaagatagaaagcatgttttagttgaactttttttcttctagaaacaatgagtgacggaatggcagcgatacaaatgataataaccgagtatagtgcagatgtgttcatcgtaatcagcaagcggcctgcagtgatcatggccagggccgttgccgttgaaacccagcctccataaagagcggcaatcataatagggatatttcgaagatcaataattgaatgctgataggtaaatccaaaaaccatcagaataaccccgagcaaaccgcaggccagtcctttaacagcttgaaaggatatgctgtcttttttatgtactagcctttctttaaacaggtgggtgaagagataattaaatgtgattaaaatggtcaaatttacaaacagttctttcagcaaatattatcacccttatataaggtactaaagatggaagggaaagaaaagaacaaaaaaggcattatataaggtttttttacttgaattgataagttaaaataattcgcacttgacccatcggaattagtgtaatatagtaaatgagaaaatttgaagggagagtttacctgctttggagactttactggttgtattacatgtatttattttatttttacttatcttagggctctttgttatgcagaaaaaacatgtttccttctctaaacgtgtatttactgcgctggggctggggattgtattcggatttgcgcttcagctgatttacggcccgacttcaaatatagtcattcaaacagccgactggtttaatattgccgggggcggatatgtcaaattgcttcagatggttgtcatgccgctcgtctttatttcgattctcggcgcctttacaaagctgaagctgacaaaaaatcttgggaaaatcagcggtttgattatcgggattttagtagcaacaacagcagttgctgcagctgtcggtatcgcgtccgcgctttcatttgatctgcaggcgattcaggttgaccaaggaagtacagagctttcacggggacaggagcttcagcagaaatcagaggatatgacagcgaaaacgctgccgcagcagattgttgaactgctgcctggaaacccgtttttagattttacgggagctagaccgacttcaacgatcgctgtcgttatttttgccgctttccttggagtggcattcctcggcgtaaaacacaaacagccggaacaggcagaaacatttaaaaaactggttgatgccgtttatgccattgtcatgcgtgttgtcacactcattttgagactgacgccttatggggtgctggccatcatgacaaaaacaattgcaacgagtgatcttgacagcattctaaaactgggcatgttcgtgattgcatcatatgccgcgttaatcactatgtttatcattcatttgctgctgctgacgttcagcggcttgaatccggtgatttatttgaaaaaagcggtgcctgtacttgtatttgcatttacgtcaaggtctagcgcaggtgctttaccgctgaatattaaaacacagagaagcatgggtgtaccggagggaatcgcaaactttgccggttcgttcggtctttcgatcggccaaaatggatgtgccggcatttatcctgcgatgctggcgatgatgattgctccgactgtcggccaaaatccatttgacccggtgtttattatcactgttatcgcagtcgttgccatcagctccttcggggttgccggagtcggcggcggagcgacattcgcggcgcttcttgttttatcatcattaaacatgcctgtcgcgctcgccggtttgttaatctcaattgaaccgttaatcgacatggggcgtactgctttgaatgtcagcggaagcatgacatccggtcttattacaagtaaggtcacaaaagaaattgatcaaggggcatttcatgatcaatccagagtgattgaagctgaagaagcgtaacatatgaaaacgtgtaatccaagaggattacacgtttttttaacggccaggctctaagtcctccagcatttccatcatcgtgttgtcgtccatgacattcattgcgttttgttcaaaatgaatgggttcagcataatgcggctgtctttttttcgcggctgtctcagtttgcctagtttgagactgtgtatgctgatgctgtggttgctgctgtccagcgtgctggtgctgacggccattttgccgctggctttgatgctgcgaacggtcctggttatcaccgctgcttccgctgcttccgctaaatgcttgtttgaccatgtttcctacattagaagcatcaaacgtgttattttctgaatttcgtctgttcatttgtcctgtgataaacccgctgattctttggcggatctgaggtgataatgcagtaataagcatagttgatcctatgatcaatgctgcggggctgattcctcttcgctggttgaacaacatgatccctcctttgcagtgtattcatattttccccctcgttagacaaattaaccgttatatttcccgggaaagcatttcctccagatttgcatgcataattaaagccagttagaaaaacctataagtaaagtgataaaggaggaattcacatgtttggaaaaaaacaagtccttgcgtctgtgcttcttatccctttgcttatgactggctgcggtgtagccgaccaaggtgagggcagacgtgataataatgatgtaagaaacgtaaattatcgaaatccggccaatgacgatatgcggaatgtaaacaatcgggataacgttgacaacaatgttaatgataatgtcaataacaatcgtgtaaatgacgataataacaacgaccgaaaacttgaggttgctgatgaagcagctgataaagtaacagacctaaaagaagtaaagcatgccgatatcattgtggctggaaatcaagcctacgttgcagtcgttttaaccaatggaaataaaggtgcagtagaaaacaatctgaagaaaaaaatagccaaaaaggtaagatctactgacaaaaacattgataatgtttacgtttcagctaaccctgattttgtagagcgtatgcaaggatatggaaagcgtattcaaaatggtgacccaatcgccggattatttgatgaatttacacaaactgtacagcgtgtattccctaacgctgaataaatgaaagaagccgcacaatttgtgcggctttttctttgcgttaatgacacactgcgaactcaggctgcatagagtaaaaataaaaaggtacaagacggaccggctcagggagggagacgtttgcgggatggcataggaaagcgtgcggcatccgctctattcctgtgcggagtccttgtgatgctggctgtaagctcagccatcgtatcaagcgcgatgtatatcctgtcttttccaggtcaggcatctggaataacaaaagaacaagtgacgaagcacatgaagaaagagtcattcaaacaggccgatatttattacacttctaaggaaaagtccttactgccattgacgaaagaaacgcttgaatatgcggtcagtattaatcagattatgattggatattcgaatcaaaagcctattgacattattttttttcctaatgaaaaacagatggaggcttactccggtttattggatgtagttggtttttattctgaacgggagcagctgatcggattgttgcctgaagagaaaaagaaactgttagaaggggacgaggtagcggtttatttgtaccagagattgttgattcatgaatactcgcaccatgcgtttcaccagaaattgaaggagcttgagacggatcccgatgagtttccgttatggtttcatgaagggttaagcgagtggattgcgaactatgaattgctcatagatccgatcacgttttctgtcgtgccctttgaccgtttgcagactgatcgagactggcaggaagctagagccgaatatgacactgatgtctatttgcaaagcttttatatgatcgatgagctgacggacaaatacgggaaagacattatttcagaaatgattaaggaaacggcaaaaaaaggggactttgaaaaagggtttaaatcagcaacaaaggaaagtcttgatcaatttgaaaaagattttaagaaaaaatttgaaaaaaacagtgcggcattggatagtatctatccaatgcctttgttattagtgaagtccttgctgacccattccgccttgtgtcggaggcatttgtccttgggcaggggcgaatgaatttcgcagctgttccatatcctgcgcatcaagctgaggaacctggtaatagccgtgtttgttttggtataggaaaatttcaaatgccatttcaacatactcctgaatttgcgcagacagtacgcgtcttacggccggatttgtcatttccagagaagccatcgtcagcatagaagcttgtgctttaatcgcgcaaagcatttgtcggctgatgatgctgtcatcaatatcattcatggattgaacaggttttttaggctgtgacggctgcatgccgtaaacagtctggttgtcttccttcatcatataagttgctgttttttgtgaaggttcgcttcctgttttgaagcattctgcagttatattgtattgagatgtgatgaattgatgttgacgatcaaggatgtttagtaattcttgatccttacagaattgtctcagcatcataaactgatcaagcacagtaagtgttccggaaagcacctcatgcatatcaaacatttcatgtccgccgtggtttttatgcggtttgccaggaatacctttgttcatttgggattgctgctgctgattgaactgatccaaaccgaattcctccttttttttcagatcagctgtattttgtgtcagtctgccgtgtattatgcagaagcctgaaaggaattatatgctgtctgtcgaaatgataagcagacaaaatcgttgtcattatgtgtataagggaggaaatatgatgaggcgtattctgcatattgtgttgatcacggcattaatgttcttaaatgtaatgtacacgttcgaagctgtaaaggcagctgaaccgcaacagcctatatcgattgagaaggcaatacagcaaaaagaaggacaggcacttgtcgaaggatatgcagtcggccaggctgtttccccgcagcattataaactgacaagccctttttcaaatgattataatgttgcgctggcagaccgtaaaaacaaaacatcgcccgaacacatccttcctgtgcaaatcccctccgccttcagaagccaatttgggctgcaaaccaatccgcttcttcttgggaaaaagataacggttcaaggaaagcttgaaaattactttaacacgacaggacttaaaaacgttcagtcgatgaacgtaaccgatgacacaaaaactccgccggctgaacagcaagtgaccataaatgaagcacggggaaggctgaatgaagaagtaacgataaaagggatcattacagctgatcaaaacgcaatcggaggcgggaagctgtcgacctttttgcaagatgaaaccggaggcattaacatttattcgccatcccctgaacaatttcccgaattaaaagagggtatggatgtcacggtgacagggaaaatcacgtcttaccaggggctgaaagaaatcgttccaaactcatcaggcatcaaaatcaaccagtcaaatcaatccctccccgcccccaaacacttaacaatcaatgaacttattaacggcagcctaggtgatcagtatgaaggacgccttgtgaaactaaccgcttttgtttcctcaattccaagttctcctgccggcggcggttacaatgtaacaatgattgatgacgaccatcatgcaatgacgctccgggttatgaatgaaacaggggtgataaacgagcttgatgagggcaaatggtatgaatttaccggtgtgttaagcagataccaaacctttcagctgcttccgcgaaaatcggctgacctgaagctgcttgaagagcagcccgcacctccgtctgcagagggagaatatgaagggattgttgaccgggtagttgacggcgataccattcatcttaaatctccggtgcttggaacgacaaaaatccggtttgtaaatgtagatgcacccgaaacatatcacacaccaaaaaatgacgcagatgaaaatcaattaagatttggcaaaaaagcatctgactatctaaaaacggttctgtccccgggtgataaaattactgtcaaggtcgggagtgaagccaaggacagctatggcagattgctcggacaagtcataaccgaatcaggttcaaacgtgaacttagagcttgtaaaaaacggctatgctccgacgtattttatttggccggttgacaatgaagaggattatcagcaatttcaggccgcagtagccgctgcaaaaaaagatcaaaaaggaatttggaatgaaaacgatcccctcatggaaatgccgtttgaattcagagccagagagcaagggaaaggcctgacaagatatgtgggggactcgtcgaataaaacatatgtgcagccagctgactggaagaagatagctgtggaaaacagaattttcttcgcctcagcaagtgaagcggagagcgcgggatataaaaaaaggcaaacggcacctcaagaacatgtgccgcttagaattctcagcatgaatgatttgcatggcaaaatcgatcagcaatatgagcttgatcttgatggaaatggaactgtagacggcacgtttggacgcatggattatgccgccgcatatttaaaagaaaaaaaggctgaaaagaaaaactcgctgattgtgcacgcgggagatatgatcggcggaagctctccagtttcctctcttcttcaggatgaaccgactgtagaactgatggaggacatcggatttgatgtcggaaccgtgggaaaccacgaatttgatgaaggcacggatgaacttctgaggatcttaaatggcggtgatcatccgaaaggcacaagcggatatgatggacagaactttccccttgtatgtgccaattgtaaaatgaaatcaactggagagccctttttgccggcttacgacatcattaatgtggagggcgtacccgttgcttttatcggagttgtcacacagtcggcagctggcatggttatgcctgaaggaataaaaaatatcgagtttacagatgaagcaacagcggtgaataaggcggccgaagagctcaagaaaaaaggcgtgaaggccatcgcggttctcgcacatatgtcagctgaacaaaacggcaacgccattaccggtgagtctgctgatcttgcaaacaaaacagattctgaaattgacgtgatttttgccgcgcataatcatcaggttgttaacggtgaagtgaatggaaaactgattgttcaagcgtttgaatatggaaaagcgataggtgtcgttgatgtagagatcgataaaacgacaaaagacattgtcaaaaagtccgcggaaatcgtatatgttgatcaaagtaaaatcgaaccggatgtcagcgcgtcagccattttaaagaaatacgaaacaattgcggaaccgattatcagcgaggtagtcggcgaagccgctgttgatatggaaggggggtattcaaatgacggcgatacacctcttggaaacctgattgcggatggtatgagagctgccatgaaaacggattttgcccttatgaatggcggcggcatacgtgaagcgctgaagaagggtccaattacgtggggagatctttacaatattcagccgtttggaaatgtgttaacgaagcttgagattaaaggaaaagatttaagagagattatcaatgcgcaaatctcgccggtttttgggcctgactacagcatcagcgggtttacgtatacgtgggataaagaaaccggaaaagcagttgatatgaaaatggcagatggcaccgagatccagcccgatgccacatatacattgaccgtcaacaactttatggcgacggcgacaggagccaaatatcagccaatcggactgctgggaaaaaatccggtgacagggcctgaggatttggaagcgacagttgagtacgtgaagagttttgatgagccaattgcgtatacaaaagagggaagaattaagcttgctgaagccagtgatattgaagaccctgtaacagaagacccgataacggaagagcctggagatgatccggggacggaggatccgattaaagaggatccaaggccaggtgaagatttgcctgatataaaagaaactccgggaacagcaccggttcatcagcttccgccttcagccatttcgagattcaatgaaataccaatcaacaacacaaaaaccgctgatactgctaatagcatcagcacattgccgttacaaaccgagactgcggaaagcgggtctgatcatcagcttccggatacgtcagcgggctactataactttatggtaatcggtgcggcggtgacattgtcaggaacttatctatatgtcagaagaaaaaggagcgcctccagaacgtgaaaaaagttattccactattcatcattgctgccggcctagtgatcgcaggctatggaggctttaaattgatcgatacgaatacgaaaacggaacagacattaaaagaagcaaagctggcggctaaaaagccgcaggaagcttcggggacgaaaaatagcacagatcaagcaaagaacaaagcatcatttaagcctgagaccggccaagcgagcggcattttagaaataccgaaaatcaatgcagagcttccgatcgtggagggcaccgatgctgatgatttagaaaaaggtgtcgggcattacaaggacagctattatcctgatgaaaacggacaaattgtgctgtcagggcatcgggataccgtgtttcgccggacgggagagctggaaaagggggatcagctccgtcttctcctgtcatatggagaattcacatatgaaattgtaaaaacaaaaattgtcgataaggatgacacatctattatcacgctccagcatgaaaaggaagagctgattctgacgacctgctatccgttttcatacgtcggaaatgccccgaagcgctatattatatatggaaaacgagtgacttaaaaagccgaggcagtgcctgcggcttttcttcatgaaaaatatgtgcggcaaaggtttttcatatcagcagggaaaggggcttcagcaactatgagctcgtctgttatcgggtgaaccgcttgtactttattggcgtgcagtgcctgcctgtttagcagcttgctcccgcctccgtaaagcgagtctcctgtcaacggatggccgaggctcgccagatgaacacggatttggtgtgttctgcctgtttccagctctaattcaacgagcgacagccgttctttcgcattgctggccattaccttgaaatgagtgacggctgtttgcccgcctggtgaaacccggcgtcttgtcgggtgtgagcggtctctgccgatcggtgaattaattgtcccttttttcgtccgtagcttaccttcagcgatagcggtatacgtacgcttcagcgtctttttctctaactgctggtctaagatggcgtgtgccaaacgatgcttggcaaaaacgatagcgccagatgtatcctgatcaagacgatggacgtggcgcaccttacatgtttcgccatttatctgataatgatacgcgatcaaattagccagtgtgccggtttgcccatcctcattcggatgcgtcgcgatgccagcgggtttattgatgatgagcatatgattgtcctcaaataaaatatcaagctcgccatactccggaatgaccgaagatgcttcactttcctgaagatcaatgaacacgcggtctcccttttttacaatcatattgtttaagacggattcgtgattgacctttatctgttgatgggacatccagtcttgtatcactggtttagaagctttgagcgctgttttgagtacggaaaacagccattggccgtcctgtttttcattgatgaggatctcaagccctctgcctttttggttcatgttaaatggctccttttcgaagcggaaggctgctgtttctcataggaaacacttaccttagctttcgcgtttttttctgtgctattcttgagtaagacttaggatattcgatggcaagaaaggtgattgacgtgagaattgtgaacgcagcaactgcagaacaggagagctttatcaaggagctgtctatggagctgatccatgatgtatttcctctttatttctccgaactggacattcagcgctttaaaaagaaaggcgttctgtctttaaataaccattattaccaaggaacattaaaagaagcatttcaaattatggcttgtctgcaaatgatacatattatcctgaccaagccttcgccgcactctgatttgagtgatcaggcgatttttgaaaaaaacagcaagatgctgaatgattttgggatttattttccgtttgctttttctgactttcaaaagaagactaacaaagcctttttcggtcaaagaaggctgatataatcatgcggcaagggcttttctatttttagaaaagctctttttgtatcagagaaatcatatcataaaacctttcctctaactccctttttaaacggctcgtgtctgaacatactaatgattgaaaggggtgctgacaatgagttcagttaaagatacaatgacaacgcaggtggcaaccgtttctccgaatcaaacgattcaggaagcggcttctctaatgaaacagcataacgtcggggcgatccccgttgtagagcaaggtgttttaaaaggaatgctgactgaccgtgacattgcattaagaactacagctcagggccgtgatggccagacacccgtttcagaagtgatgtcaacagaactcgtatcaggaaaccctaatatgagtctggaagacgcgtcgcagctgatggcccagcaccaaatccgccgccttcctattgtagatcaaaacaatctagtcgggatcgttgcgcttggagacctggcagtcaatcagatgtcgaacgagtctgcgggatcagcgctgacaaacatttctcaccaaaacattcattaataagaaagagcttgcagtgtgcaggctctttcttcacataaaaccttactttttgaaagcagacttgtttcggggtatagtgagtgtatacatatgtctcaattcgtactaaaggagttgtacccagtgattaaagcgttaatttttgattttgacgggcttattctagatacagaaacacacgaatatgaggttcttcaggaaatatttgaagagcacggctcagtgctgccgctatctgtctggggaaaggtcatcggaactgctgcgggtttccggccttttgaatatttagaagagcagatcgggaaaaagctgaaccatgaagagctcacacaattgagaagagagcggtttgccaaacgcatggaatcagaaaaagcgagacctggtgtcgaagcgtatttgaatgcggcaaaggatttaggcttaaaaataggccttgcctccagctctgattataaatgggtgtccggccatttgaagcaaatcggcctgtttgatgattttgaagttattcaaacggcggatgatgtggaagaggtgaagccgaatcctgaactctatttattggcggcaaagaacctgggggtatcgccagcggaatgtctcgcgtttgaggattctgtcaatggttcgattgctgcgaaacgtgcaggcatgaagtgtgtcattgtcccgaataaagtaacgggtaccttgatgtttgaagactatgatcacaggcttgaatcaatggcggagatggagctcgccctattgcttgatcatctgaactcacaaaactagaaaggagcgagtaggttgtctgagaaattagatttgacccggtttgaaaagaaaatggttatccgcaatatcgaagagaaagacatcgacaagattatcgatcttcaaaaggactgctttccaggaatggagccttggaagcgggagcatttaatcagccatttggagcattttccggaaggacagttttgtgcagaattcgaaggtgaaattatcggttcgtgctcaagtctcctgattaactttgatgaatatgatgaccgccatacgtggcaggacattacagatgacggttatatcaccaaccataatcctgacggcttgaatatgtacggaattgaagtcatggtgcacccgaaatacagacgaatgaagatcggccaccgtttgtacgaggcgagaaaggacttagccagacgcttaaacctgaaaagcatcatcataggcggacggattccaaactatcacaaatatgcagaggaaatgacagcgagagagtatgttgaacaggtgacacgccaccaaatttacgatccggttctttcttttcagctgatgaacggctttacccttatgcgaattaacccgaactatctcccggatgatacagcttcgatcaagtatgcgacgctgatggaatggaataatgtcgattatctaccgcagcagacaaaacgctattataaatcggcgttccctgttagaatttgtgtgatccaatacgaaatgaagaaaatttattcctttgaggaatttgcgaatcaagtagaatactatgtcgatgttgcttccgacgcaagatctgattttgcggtgttcccggaaattttcacaacccagctgatgtccttccttgaggaacggtcaccgagcttggcggtgcagagaattaccgagtatacagaagattacatcagcctgtttactgacttggctgtgaagtataacgtcaacattatcggcggatctcatttcgtcgaagaggaaggcaagatctataatatcgcttacctgttcagacgggacggaacgatcgagaagcaatacaaactccatattacgccgaatgaacgcaaatggtgggggatcagcgcaggagaccaagttcgcgtgtttgatacggactgcgggaaaatcgcgatccagatctgttatgacattgaatttcctgagcttgcccggattgcggctgataaaggagccaaaatcatctttacgccattttgtacagaagaccgtcaaggctatctgcgtgtcagatactgttcgcaggctagagcggttgaaaatcaaatttatacggttatctctggaacggtcggaaaccttccgcaaacggaaaacatggatatccaatacgcccagtcaggcatctttgccccgtctgattttgaattcgcccgagacggcattgtcggcgaaacaaacccgaatattgaaatggtcgtcatcggcgatgttgacctggaaattctcagaagacagcgccaaaacggtacagtgcgccagctaaaagacagacgacgtgatatttatcatattcaatataaaaaataattcccaaaaaacccgcctgaattggcgggtttttttaaacaaaagcggaattgtttaggtgctttctttaaaataaaagtaaattgtatagtggatgtgccttatggagtttctgtattttcgccatttcctatatcatacagaaaacggctaggcttcacattgctattgcaatggctgtccaagttgtttcgagtgcgacctttatcagtacgatgctgagcattgtcactttgcctgttttgctttggaagctgcatcctctttcttcttgagaaaggggatgttttattatttacgcggtttattgactctgacccggtctggctttatattgaaggcagggaaatcatcaccaagacatcacataaagagaaggtctgtttcaattgaattggcattatagggaacgctaatgaaatggagatgatggggatggaaaacattcagcaaaatcagggattaaagcaaaaagatgagcaatttgtgtggcatgccatgaagggagcgcatcaagcggacagcctgatagcccagaaggccgaaggggcctgggtaaccgacacagacggacgccgctatttggatgcgatgtccggtttgtggtgcgtcaacattggttacggcagaaaggagcttgcggaggctgcctatgagcaactaaaggagctgccttactacccgttaacgcaaagtcacgcacccgcaattcaactggcggaaaagctgaatgaatggcttggcggcgattatgttatttttttttccaacagcggatcggaagcaaacgaaactgcttttaaaattgcccgccagtaccatctgcaaaacggcgaccacagccgttataaattcatctcaagatatcgggcataccacggcaatacattgggagcgctctcagctaccggacaggcgcagcggaaatataaatacgagcctttgagccaagggttcctgcatgcagctccgccagatatataccggaatcctgatgatgcagacacgcttgaaagcgcaaatgaaatcgaccgcatcatgacatgggaattaagcgaaacgattgccggggtcattatggagcccatcattacaggcggaggcatcctaatgccgccggacggatatatgaagaaggtggaggacatttgccggcgccacggagcccttttgatttgcgatgaagtgatctgcgggtttggacggacaggtgagccgttcgggtttatgcactacggtgtgaagcctgatatcattacgatggcaaagggaatcacaagcgcgtatctgccattgtcagcgactgctgtgaaacgggacattttcgaagcgtatcagggggaagctccttatgaccgtttccgccacgtgaacacgttcggcggaagcccggctgcctgtgctttggcgttgaaaaacctgcaaattatggaggacgaacagctgattcagcgatcccgtgatcttggagcaaagcttttaggtgagcttcaagctctgagagaacacccggcagtcggggatgttagaggaaaagggctgctgatcggaatcgaactcgtcaaagacaaattgactaaagagccggctgatgccgccaaagtaaaccaagtggttgcggcgtgcaaagaaaaagggctgatcatcggcaaaaacggcgatacagtcgccggctacaacaatgtcatccagcttgcgccgccattttgcctgacagaagaggacctttcctttatcgtgaaaacggtgaaagaaagctttcaaacgatataatataaaagtgaattattaaaggagcacatgatgagttttcacaaccagccgatcttaccggctattcgcaatatgaagcaatttgatgagtttttgaacagttcattctcttacggtgttattcttgatattcatctcggccagctgaagggcgtgatcaaagaagcgcaaaagcacggaaagaacatgatggtgcacgtcgatctcattcaagggattaagcatgacgaatacggtgcggaatttatatgtcaggatatcaagcccgctgggattatttccacaagatcgaatgtgattgccaaagcgaagcagaagaaaatttatgccattcagcgcctgtttttgcttgatacaagcgcgatggagaaaagcatggagtttatcggcaagcataagcctgacttcatcgaagtgcttcccggcatcgttccgtcactcattcaggaaataaaagagaaaacagggattcccatctttgccgggggtttcatccgtacggaagaggatgtagagcaggcattgaaagcgggggctgtagctgtcacaacatctaataccaaattgtggaaaaaatatgaaaactttttgacggaaagtgattgacaccgctttcatgcactgatacaattgcactaggttaatacattgtgatggagaactcggagaccacagcagctctttacggcaaatgtttatgcacccgtaaagcggtttgttgtggtttttttattctcttcttctctatcatgctttttaatcgtgactttaggaggaatgtgctatgacagcattttggggagaagtcatcggtacgatgctgcttatcatttttggtgcaggtgtttgtgcaggtgtcaatttaaagaaatcgctttcattccagtctggctggattgttgttgtatttggatggggattgggtgttgccatggcggcatacgcggttggcggcatcagcggtgcccatttgaatccggcgctaacgatagcgcttgcatttgtaggagattttccttggaaagaggttccggtttatattgcggcgcaaatgatcggagcgatcatcggtgcggtgattatttatctgcattacctcccgcactggaagtcaacggatgatcccgctgccaagctgggtgttttctcaacagggcccagcattccgcatacatttgcaaacgttttaagcgaagtgattgggacatttgtccttgtacttggaatcttggccataggtgcaaatcaatttacagaaggacttaatcctttaatcgtcggtttcctcattgtagcaatcggtatttctctgggaggcaccaccggctatgctatcaatcctgcacgtgacttaggtccgcggatcgcccacgcttttcttccgattccggggaagggctcatcaaactggaaatacgcatgggttccggtagtcggcccgattttaggcggatcattcggcggtgtattttacaacgctgcatttaaagggcacatcacaagcagcttctggattgtaagcgttatattggttgtggtattgttaggactctatgtttatacgaaatcacattctgctaaaacattatcaaattctaaatatatttaatcaaaggggagacatcttatggaaacgtacattttatccttagatcaggggacgacaagttcaagagcgattctgtttaataaagaaggcaaaattgtccactctgctcaaaaggaatttacacaatacttcccgcatcctggctgggttgagcataatgccaatgaaatttggggctctgtcctcgcggttatcgcctcagtcatctctgaatcaggaatcagcgcttctcaaattgccggcatcggcatcacgaaccagcgcgagacgacggttgtgtgggataaagatacaggaagtcctgtctataatgcaatcgtttggcagtccagacagacgtccggcatttgtgaggaacttcgtgaaaaaggatataatgataaattcagagaaaaaacagggcttttaatcgatccttacttctccggcacgaaggtgaagtggattttagacaatgtggaaggcgcaagagaaaaagcggaaaaaggcgagctgctgtttggaacgattgatacgtggctcatttggaaaatgtcaggcggaaaagcgcatgtgaccgattactccaatgcctcaagaacactgatgtttaatatttacgatttaaaatgggacgatgaactgctcgacattctaggcgtaccgaaatccatgctccctgaagtgaagccgtcctctcatgtgtatgcggagactgttgattatcacttcttcggaaaaaatatcccgattgctggagcggcaggcgaccagcagtccgcattgttcggccaggcatgctttgaagaaggcatggggaaaaacacttacggcacaggatgtttcatgctgatgaataccggggaaaaagcaattaagtccgaacatgggcttttgacaacaatcgcttggggcattgacggaaaagtgaactatgcgttagaagggagcatttttgtcgcaggctctgccatccagtggcttagagacggtttgagaatgttccaggattcatcgctaagcgaatcttatgcagaaaaagtggattcaactgacggcgtgtatgttgttccagcatttgtcggactgggaacgccttactgggacagcgatgtgcgcggttcggttttcggcctgacaagagggacaacaaaagagcactttatccgtgcgacactggagtcattggcttatcagaccaaagatgtgcttgacgcaatggaagcagattcaaacatttcattaaagacgctccgtgtagacggaggagctgtaaaaaacaatttcctaatgcagttccaaggagacctgttgaatgttcctgtggagcgcccggaaattaatgaaacgactgcacttggcgcggcttatttggcgggtatcgctgtgggattctggaaggaccgttctgaaatcgcgaaccagtggaatctggataaacggtttgagcctgaattggaagaagaaaaacgaaatgagctgtataaaggctggcaaaaagccgtgaaagcagctatggcttttaaataaagtaatactatggtataatggttacaagttaataagaacggtcctgagatgaggagagaccacagcaccaaagtgtaagcatgcactttggctgttgtggtctctttttctatttaccgtgacaacaaggaggaaacgtaatgatgaatcatcaattttcaagtcttgaaagagatcgcatgctgacagacatgacgaaaaaaacatatgacctatttattatcggaggaggaattacaggagccggaacagctcttgacgcggcatcaaggggaatgaaggtcgcactaagcgaaatgcaggactttgcggcgggaacatcaagccgatcaacgaagctggtacatggcggcttgcgctatttaaaacaatttgaagtgaaaatggtcgctgaggtaggaaaagagcgggcgattgtgtatgaaaacggcccgcatgtcactacaccggaatggatgctgcttccgtttcataaaggcggcacattcggttcatttacaacatctattgggttaagggtttatgacttccttgcaggtgtgaaaaagtcagaacgaagaagcatgctttcagcaaaagaaacgctgcaaaaagagcctttggtgaaaaaagacggcttaaaaggcggcgggtactatgtggaataccgcactgacgatgcgagactgaccatcgaagtcatgaaggaagcggttaaattcggggcagagcctgtgaattactccaaagtgaaggagcttctttacgaaaaaggcaaagccgtcggcgtattaattgaagatgtgctgacaaagaaagaatataaagtgtatgcgaaaaaaattgtcaatgctacaggcccttgggtcgatcagctcagagaaaaagaccattcgaaaaacggaaagcatttgcagcatacaaaaggcattcaccttgtatttgaccagtctgtctttccgctgaaacaggctgtatatttcgatacacctgatggccggatggtatttgcgattcctcgtgaaggcaaaacatacgtgggaacaacagacactgtttacaaagaggcgctggagcatccgcggatgacaacggaggatcgtgattatgtcatcaaatcaatcaattacatgttcccggaactgaatatcactgcgaatgacatcgaatccagctgggcggggctgcgtccgctgattcatgaagaaggcaaagatccttctgaaatttcacggaaagacgagatttggacatctgactcaggcctgatcaccattgccggcggaaaactgactggatacagaaaaatggcggagcacatcgttgatcttgtccgtgatcgcttaaaagaagagggcgaaaaggattttggaccatgtaaaacgaaaaacatgccaatctctggcgggcacgtcggcggttcgaaaaatcttatgtccttcgttaccgcgaaaacaaaagaaggaattgcagccggtttatcagaaaaagacgcaaaacagcttgcgatcagatacggctctaacgtagatcgcgtctttgaccgggtagaagcgctgaaagatgaggccgcgaaacgcaacattccggttcatattcttgctgaggcagaatacagtatagaagaagagatgactgcaacccctgctgacttctttgtccgcagaacgggacgtttattttttgatatcaattgggtaagaacatataaagatgccgttattgattttatgagcgagcgattccaatgggatgagcaggcgaaaaacaaacatacagaaaacctcaacaagcttttacacgatgcggtcgtaccgcttgagcaataaatcataacgggctgtctgcagcccgttatttctttttacgtgccgaaagggggagatctcaggttatcaagtgacagaggcacccgcttcatataaaataatggcataagctgatacataggaggacgaatatgacttggagaaagagctatgaacgctggaaacagacagaacatttagatctggaattaaaagagcgccttattgaattagagggagatgaacaggcccttgaggactgtttctataaagaccttgaattcggtaccggcggaatgcgcggggaaatcggcgccgggacaaatcggatgaatatttacactgtgcgcaaagcatcggccgggtttgcggcatacatctcgaagcaaggtgaggaagcgaaaaaacggggcgttgtcattgcttatgattcccgccataagtctccggagttcgcgatggaagcggcaaaaacacttgcgacacaaggcatccaaacatacgtgtttgatgagcttcgcccgacgccagagctgtcattcgctgttagacagctgaacgcttatggtggaattgtggtaacggcaagccataacccgcctgaatataacggctacaaagtatacggggatgatggcggccagctgcctccaaaggaagcggacatcgtcattgagcaggtaaacgcgattgaaaatgagctgacgatcacagtggacgaagaaaataagttaaaagaaaaaggcttaatcaaaatcatcggtgaagatattgataaagtttatacagaaaaactgacgtccatttctgtacatcctgaattatcggaagaagtagatgtaaaggttgttttcacaccgctgcatggaactgcaaataaaccggtcagacgcggtcttgaagcactcggctacaaaaatgtaacggttgtcaaagaacaggaactgccggattcaaacttctccactgttacatcgccgaacccggaagagcatgcggcattcgaatatgccattaagcttggggaggagcagaatgcagatattctcatcgcgacagatcctgatgctgaccgcctcggcatcgcggtgaaaaacgatcaaggcaaatatacagtgctgacaggaaaccaaaccggagcgttgctgcttcattacctgctttctgaaaagaaaaaacaaggcatcctgcctgataacggtgttgttctcaaaacgatcgtcacaagcgaaatcggccgtgctgtagcttcttcattcggccttgatacgattgatacgctgacaggctttaagtttatcggtgaaaagattaaggaatacgaagcatcaggccagtataccttccaattcggttatgaagagagctacggttatttaatcggggattttgcccgcgataaggacgccattcaggctgcgcttttggcagttgaagtttgcgcgttctataaaaaacagggaatgtcattgtatgaggcgctcatcaatctctttaacgaatatggtttttatcgtgaagggctgaaatccctgacgctgaaaggcaaacaaggagcagagcaaattgaagcgattcttgcttccttcagacaaaatccgccgcagaaaatggcgggcaaacaggttgtcacagcagaagattacgctgtaagcaaacggacgcttctgactgaaagcaaagaagaagccatcgacttgccaaaatcaaatgtattgaaatacttcctggaagacgggtcttggttctgtctccgtccttctggaactgagccgaaggttaaattttatttcgccgtaaaagggtcatctttggaagacagtgaaaagcgacttgccgtcctttctgaagatgtaatgaagacggtggatgaaattgttgagtcaacagcaaaataattcaagtatgagctgggtcattgtaaatgatccggctttttctttttctcatccaaaagtctgaaagaaaatcatcctacaagtgaagcaatgaaatacaaaaaactggtataatcttaaatacaagatcaatgccggagtgagaaacgtgagcaaaacgaggatggaaaaattaaaaacgctgaaaacgattgcggaaaccttaaatcaagggcacgatatcaaagcaacactggatgaggttttaaaagagttgctgagtctgacaaaccttcaatccggatggatttttctgatcgaagaagatgggtcttatacgttagcggccgacgcttatctgcccccggctttaagccgcaaggaaaaagtgctgatgtgcgaaggggagtgttactgcctgacgaaattcaataacggagggcttagaaaagctgcaaatatcatgaactgcaaacgcatcgaatcagcagaaaacctgcattgttttgacacagaagggattacgcatcatgcaactgtgcctttagaagacggggacagaagattcggattgttaaatgtagcggcggccggaaaaaccatgtttgatgaggaagagctgcatttactcgagtctgtcgcctttcagatcggaacggcaatccagcgtatgaggctttctgaatatcaacaaaaaaatgctcttttaatggagcgtaaccgcctcgctcaggagcttcacgattcagtcaatcaaatgctgttttccgtcagtttaactgccaaagctgcgaagacactaacaaaagatgaaaatttacagcagatgattgatttcatccaaaacctatcacaggacgcgctcgcagaaatgaaagcgttaatttggcagcttcgccccggaggattggaaaaagggctggctgaagccattaaaagctatggtgcgctcattggattgaagatcatttttacacaaaaaggctgtcctgttctgactgatgagcaggagcatatgctatggcgtgtcgtacaggaagctttaaataactgcaaaaagcatgccggaacggatacggcgtatgttagtctgactgcttctttgtgccatgcggagctggatatcatcgatcatggggcaggatttcgctatgaagcgcatgccggtctgccttcacttggcataaaaggtatgaaagagcgagcggaaaaagccggagctaagttttggattgagtcagcgcttggaactggaacaaagctgtccatcaggcttccgctaaaaagccgaaaaggaggggcggtatgaaaattgtcattgctgatgatcatcatgttgtcagaaagggtctgcgttttttctttgccacccaggatgatattgaagtcgtcggagaagctgcaactggattagaagccctccgtgtcatcgaagagacaaagccggatcttgtgctaatggatttgtctatgcccgagatggacggcattcaagccattaaaaaagcaatacagcaatttccggatacgaatatcattgtgctgacgagctactctgatcaggagcacgtcatccccgcgcttcaggcaggcgcgaaggcgtatcaattaaaggatacggagcccgaggaattggtgaaaacacgacaagtgcatggtggcgaatacaagctttctacagctattatgccccatgtgctgacacatatgaaaaatcagcacgacccggaaaaagaaaaatactatcaattaactagaagggaaaaagacgttctgactgaaatagcgaacgggaaaagcaataaagaaatcgcagcagccttgtttatttcagaaaaaacagtaaaaacccatgtatcgaatcttttagcaaaacttgaagtggccgatcgcacgcaagcagcgcttttcgcagtgaaatataacctgaatggagagatctcaaaatgaacatgttagtcataaatggcacgccaagaaaacatggcagaacaagaattgcagcatcctatattgcagctctgtatcacacggatttgattgatctaagcgagtttgtattgcccgtttttaacggtgaagcggaacaatctgaactgttgaaagtacaggagcttaagcaacgcgttacgaaagcggatgcgattgtattattatcgcctgaatatcacagcggcatgagcggcgctttaaaaaatgccttggattttctaagcagcgaacaattcaaatataagcccgttgcattattggcagtagcgggaggcggaaaaggcggcatcaatgcgctgaacaatatgagaactgtgatgcggggtgtctacgccaatgtcattccgaagcagctggtgcttgatccggtgcatattgatgttgaaaatgctacagtggctgaaaacattaaggaaagcataaaagagcttgtcgaagaactcagcatgttcgcaaaagcaggaaatcccggcgtctaaacgccgggatttgtttatgtgagaagggctatttgatcttcataagtcagctctgtggcatgatcaatatatcggagaagggaatacagcatcttttctaaaacggcgtaatcctgttcaaaatgatacgcatgcagaaaatgctcaattcgttttgataacaaatcgtcctctgtacgcaccattaaaattaataaattatcccattgagaacgatgggtgtaataaagcgctttatcgtaatcggcataatccatgaatcgcttctcctttcttgggtgagaagttcatgattagtttatgccgcatcctctgttattgacggggcaaaacttgccgtctgcgtcagtaaaggggtagcaatatgagggagacataaaatcaaaatgcctgaatgaagatatcgcttttggtaaacctatgagggaatatattctgggtacaggagactgaaaaaatgaaatccctgccgtataccatcgcacttcttttttgcggattgattatcgtgtcaatggctgcaaaaggtcattcaacggacacagacgagtccgttcaaaagtgggaacagcttgcctggagcaaaattcaggatgaatataagggcgcttcattttctgattatgcttatatggggcgtacagaggtgaatgatcagcagactaaagatgtctttcgggtgacagtcagacagaaagatgacactttttctgttcgggccgaagtctattttcatccggtgacaaatcatatgatcagcatcaacgtctttaggctctaataaaaaactgtacagccgttaaggccgcacagtttctgtttttagaaatatcgttttgcaccgagatagcgctgtttccagtaagagttgttcatattggaaatgacaactccggaatcgttggcatttatgaattccccgttgcctaggtaaattccgacgtgggaagggccggctttatatgttgaaaagaaaacgaaatctccgacagcaggctggctaactgatttcattgtgttccaatatcccgctgccgttaatctagatacggatgtgactttgttcagtacatagtaaatgaatccgctgcagtcaaacccggacggtgtcgtgcctccccagcgatacggaaccccaagctgcgctttagcggccgaaatcattgtgttaatcttcgcactcgttgagctggtggtgtttgaagaaccggatgaagacgatgatgaagcttttccggaaatgaccagcttttggccaacctgcaagacatccgtttttaaattgtttttctcacgaatctgctgagctgttacattaaatttttgagcaatcacccataaggaatcaccgcttttcaccgtgtatgtagtcgtcgtgccggagcttgcatttgacgaagaagacgacgatgatgaagagcctgaagatgctttacctgtcagcttcaatacttgtccaacgtaaagcacatctgatttcagattgttgatatttcggatttgctgtacagtcaggttatagttgtttgcgattttccaaagtgaatcaccgcttttaacggtatatttagttgttgctgaagtttggttcgatttggatgaattgtctttagaagacgtatcagagccgcttgattttgttttcaacacctgattcacgtaaatggtgtctgattttaagttgttcaagaccttcaattcagcgatggacatattgactttgtttgcaattttccaaagtgaatctccaagctgcaccttatatgttcccgtagaagatgaagaacttgaactcttattagaactgctttttgaactggagcttgaactcttattagagttgctttttttactggaactagagcttgaagaaacagtaccggacacctttaatttctgcccagcacgaattaaatcgctgcttagtccgtttaattttttcagttcctgcaccgtcattttaaactcatttgcgatcagccaaagtgaatctccgcttttcactgtgtaaacagaacttccgctcttcttggttgttgagcttgaagtagatgaagaagtgctggatttgctgcctggaatagtaagcgtctggccgatcgacagaacagtagtcgaaagatgattggcggatgtgagggccgccacacttgtgttataggtttgggccagtttccataaagaatctccgcttttgaccttaatcgttgctgcttcagctggtgtcactactaaagttgtgccgacaatcgcagatgctgtcagccctgctgctaatttctttttcatcttagctctcctttttcccccaatgattttgcatttgctgtttcttttttatatcggcacatttgtctcatcgttttgcctttttataaaaatagccaaattatcttaacaataagggggaaaaagggcataaaaaaagaaggaatcttaatctattccttcatttttaaaagcttcatgatatcttctttgtttttgacgaggtcgcgcagtgtgtatttgtctaaaactgcgaggtaggctaaaagcgcttcattcagcacatgttttaagccgcaaaccggggaaataacacagagattcttgttcgcatcaaaacattcaacaatattaaaatcgtcctccgtttttctgacaacctcaccgatgttgatgtcttcagggtccatgcctaatcgtatgccgccgccccgtccgcgtatcgtttctacgtagccgagctggccgagcctgtatatgactttcatgagatgattttttgaaatagaatacgtttcggcaatctgttttatatttgaaagttctccgggacgctctgcagccagaaaaatcaacactcttaatgaataatctgtataattggttaacttcataataagacctcagaataagacattttctatatcttatcataatcgattgaaaaatgaaaaaaaaggaattaaaaaacatgcacccagctgggtgcatgttttttgcttacatgtcattcggcggattttggtttttacggtttttttcgatttctgtgttttgcattttgcgttcaaatgtagacagataacgtgatgcaaaatccttaccgccaaggccgaaggataaaccaaaagcaagtgcgaagccgctaagaacgatgatgaacgcggaattgacgattgtcgcagcgacacccagctgatccagggccataaagaaagcaagtgcgataatcgtatatttagcaataggcgctaaagacttgaattcctgaccttttatcatgcttgcgagcacttttctcaccaattctcctgcgtaaaggccgagtccgagaatgaatactgcgacaaggacattcggcagatacgcgatgatgccggtggcaatttctacgaggaagtgcagccgaacaatttgaagcgcctcagctgtaaagagcagaatgacaatgatttgcgcaatcataccgacaacttgagacaaggacagctttgcaggcgttccggcttccatgcccattttccctaagacagaatcaaagcctgcgcgatggagcagtccggacaccatggatttcacccattttcctgcccagatacccgctaatacaagcacgatggcaatcatgatgttcggaagcatgtttaaaatcgtattcagcatagagacagctggttttgaaatgccggcgacatccagctgatcaagcgctgaaatgaccaccggaatcataatgagcacataagcgattgttccgatgactgctgaaaggcttgtgtcttttaagtaaattgataaacccatacgtgccgcgaatctttcggtgccgatgcttgcaaggaaattcgtaatgatatcacggacaaggcgggcaacaagccatccgattaatacgataagcgccgctgcaaataatttcggcagaaaagcgagcacgctttccatcatatttgtaaaaggacctgaaatgccgctgattttcaaagaagataagacccctggcagaaaaacaagcagcacgagataaaagacaatttgtgaagcggtattgacagcctggtgaatatcttttccttcagacaccaaattccacttgcgcagtttgtcactcgtgttcagcttcatcccgatttttttgacaaggaagctcaaaacagaagctgcagcccatcctaacagcagaatgagtccggctttcagcacgcttgggatcgcagctgcaatcgccgaaagcatactgacaaacggcgatgccactgttgtcaggtgcaaaatgttaaagaataaaataaagacgatgatcagtgcgataaaataaacgaccttgcttatgactttttccgaggaatagcgtgaaggctttttcccagcaaagagcttgtcgtcgatttttgttttgctgagtcctttgtataccgctttttcaatgattttagcaatagcccagccgattaataagacgagtaaagcaatgattacgtttggcagcttactgagataagaagaaaacacgtctgctacattcaattggtatcgctcctttttcgtagtatggtgtgtgtttacccacttatccaataagcaaacagatgaatgtgccgggggaattttttcttgcccgagtgagactatcatcttttgtctggcgggctcatacattatagataagtccaagtaggggggattcggttgaacgcggaggagaagaagggattacagcgggcaattgaggaaattaccgaaattgcaaaaggattcggccttgatttctacccgatgagatatgaaatctgcccggctgaaattatttatacatttggcgcgtacgggatgccgacaagattcagccactggagcttcggcaagcagtttcacaagatgaagctgcactatgatctagggttaagtaagatctatgagctggtcattaactcagatccatgctacgcttttttgctggacagcaactcactgatccaaaataaattgattgtcgcacacgttcttgctcattgcgatttcttcaaaaacaactgccgtttccaaaacacgaagcgcgatatggtggaaagcatggcggcaacagctgaacggataaaacactatgaacaggttcacgggataaaagaagtcgaatcttttttagatgcaatcctttcgattcaggagcatatcgatccgtcgttggtccgaccaaagctccaatggagtgtggatgatgaggaagaggagattgaagaggcagccacgccttacgatgatctatggtctttagatgaaaagaaaccgaaaaaacaagtgaaaaaatcgaaaaaaccgttcccgccgcggcctgaaaaagatatcctgctttttatcgaggagcattcccgggagctggagccatggcagcgtgatatattaacgatgatgagagaggaaatgctttatttctggcctcagctggaaaccaagattatgaatgagggctgggcttcctattggcaccagagaattatacgtgagcttgatttaacctctgatgaagcgatcgagttcgccaagctgaatgcaggtgtcgttcagccgtccaaaacaggcattaatccttattatttagggctgaaaatatttgaagacattgaaaagaggtacaacaacccgacggaggaaatgaagaaaatgggcgtgcagcctgactccggccgggagaaaatgtttgaggtcagggagattgaatccgatatctctttcatccgcaattatttaaccaaagaattagtcatgcgcgaggatctttatttgtttcaaaaacagggccgagattataaaatcatcgataaacagtggaagtcggtgcgcgaccagctcgtaagcatgcgggtaaatggcggttttccatatttgacagtaaacgacggcgattatatgaaaaataacgaactctatattaagcattggtatgagggcatagagttggatttgaaatatttggagaaagtgcttccttatttattccagctttggggaagaagcgtgcacattgagtctgtgcttgaggataaggaagtcatgttttcgtacgacggaaaaggtgttcaccgcagatatttataaaaaagaggatgcagcgttctgcatcctttttattttccagtttttaaaatcttaaatatgatgtttgcctggtccgtattgttaatcaatccgcggaatttttcttttccggggccgtacgcgtataccggtacttcttcgccggtatgatcggtactcgtccatccgctgttggagcgggtattaaaaatcttgatgatggctttggaggcccctttgcttttgtcagcctgtgcagctgcttcaacgcttttgatttcttcagatgtgactttcagattggcatagcgggcgagcacatctttaaccggcttgccttcactgatttttttggccatgaattcaggtgttttcttagcggagagaatcggttctgcgtgccaattcttttccccgtttgcgccaatggtaaagccgccggttgtatggtcagcagttgcaatcacaagtgtatgtttgtcttttttcgcaaattcaatcgcggctttataggcctgttcaaaatctttaacctcgctcatggctcctactgtatcattgtcatgggccgcccagtcaatctggctcccttcgaccatcaagaaaaatccttttttattttggttcaggcgatcaattgctgaaaccgtcatgtctttgagagacggtgttttactgtcacggtcgagcgctttagcaagccctccatctgcgaaaagcccgagcacctgctgatctttattttttttcaatgcttgtttagttgtcacatagctgtagccggcttgtttgaattcctttgtcaagtttctgtccttgcggttaaaataagattttccgccgccgagcagcacgtctattttatgtttgccttttatcttgtcatccatatagctgttggcgatttggtccatgtttttccgtgattcattgtgggcgccatatgcggctggagtggcgtggttaatttcagacgtggcgacaagccctgttgacttgccttgctgtttggcctcttcaagtacagatttcactttttttccgtttttatcgacgccaattgcattgttatatgtcttaacgcctgtcgctaatgctgttccggctgctgctgaatctgtaatattatagtcagggtcatccggatgcgtcatcatcatgcctgtcaggttccggtcaaattctgttaacttcgggttattcggtgtgtcaccgttatttttcatggaacggtaggctcttatgtaaggcgtccccatgccgtcgcctatcatcacaatgacatttctgatctcagctttgtcttgttttttggcgctggccttttctgtttgctgaagctcagctccggcaaagattccagctgtaaggacagaaacagcggcgattggcagaagttttgatttcatattttgaaacaaactcatttttttcatgcctcctttaatgtattccgtttatcatgttagggaaactttgttaaatgcggctgttgatcatgtaaacaataagtaaagccttgtaaggaaatgaaaaaacgcttttcgttatcttgccttatttgatgtaaagcattcatttttcagaaaaatctttacctctctgtctttgcatgatatgtttgtttaaataaaaaaactgcggataaccacagctctcctcgaatatactttatcactcatttttccgatatatgagccgaccccgaaagtttttcatttatttcctttatgttgaaaaacatcccataaaacatgacaaaagcactcgttttttgtcacctttgcaatgaaaatgaaatatttaatacccttaaaaacttttttttagaacgaataattaagaaatttgtcacatgaagtcaagactatttctgatgggaatctatccttataatagaaatcaataagattaatttaaaaaaagagatacatatatatagagttaacatttggggaggaaaatatgaaaaagcaaatcattacagctacgacagcagttgttttaggatcgacgttatttgcaggagcggcatctgcacaaagcattaaggtgaaaaaaggcgacacgttatgggatctttcaagaaaatacgacacaacgatcagtaaaattaaatcagagaaccaccttcgttcagacattatttatgtgggacaaactttatcgattaacggcaaatctacaagttcaaaaagcagcagttcttcttcctcttcttctacatacaaagtaaagagcggggacagcctttggaaaatttcaaaaaaatacggcatgacaatcaatgaactgaagaagctgaatggcttaaaatcagatttgcttcgtgttggacaagtcctgaaactgaaaggttcaactagttcaagcagctccagctcatcaaaagtgtcatcgtcttcaacttctacttataaagtgaagagcggagacagcctttctaaaattgcgagcaaatacggcactacggttagcaaattaaaaagcttaaacggcttaaaatcagatgtaatctatgtcaaccaagtattgaaggtgaaaggaacaagcacaagcagctcaaaacctgcttcatcttcatcgtcttcaagcagcaaaacgtcatctacatcacttaatgtgagcaagctggtttctgatgcaaaagcgttagtcggaacgccatataaatggggcggaacgacaacttcaggctttgactgcagcggattcatttggtacgtactgaataaacaaacaagtgtgggcagaacaagcactgcaggatactggagttctatgaagagcattgccagcccgtctgttggtgatttcgtcttcttcacaacatataaatccggcccttctcacatggggatttacattggaaacaacagtttcattcatgcaggatctgacggcgtacaaatcagcagcctgaacaacagctactggaagcctcgttacctcggtgcgaaaagattctaatttttagagaaaacccgttcattggaacgggtttttttcattagacggagcacaggcgttttggttgctcctaaaaatgaaaatgtgataaaaaatccaagaactttttttctttcttattttcataaagggcaatcgcgtaagcgccggcatagggcagctgtacagactgataaggaattctgatcatctgtttctctgctaactcacgctttactgtagataaaggcagaaatgaaactccgagtccttccttgataaaccgtttcgttatatgtgtttgagtgaccttcattgttctcacaaatggaaatgtcattctgacttgacggagcaagtcgtcccagtaatcaggatgattgtgggtcaaaagcaggtattgttcgagcacctctttggcatcaatttcgttgtcttctatgaaacgcttatcgggcggggcaacaaggacgacagggtctttgtataagcagtggcagcttaaagaagaagactgtacctttaaacagcttagtccgatatctgcttccccggctttaatcagtgacgcgatttccgctgattcgaaaatcgtaaccgccatttctgtttccgtattcattgctgtgtaccgcttcatgacagaaggaagcactgtatctgcaataagcggagaaaccgcgagctgtaaggtttgagagtagccttgtctcactctgtgaagctctgccatgctgttttcataatcatcaagaagcctgagcgcatacggcaaatacgccctgccttcatcagtcagctggatttgcctgcctttacgctcgaacagcttgcagctgatttctttttctaattgcttgatatgtacggtcacagtaggctgagataagaaaagcgtttccgccgtttttcggaagttctcatattttgcagcggtcacaaaggtgtgaagccatttgaaatccatttctattctccctctgattaatatttttaattaattccctttaaaatattgattattttttaaatattatatttactataataacagaaaaggatagggggaatacaaatggtacattacggattaaagggaattacatgtgtagaaacatccatcagccatattgatggtgaaaaagggcgtctgatttacagaggacatcatgcaaaagacatcgcactgaatcacagctttgaagaagcggcttatttgattttatttggaaaactgccttcaactgaagaattgcaggtatttaaagataagctggctgcggaacggaatcttccggaacatattgagcgcttgattcaatcactgccaaacaacatggacgatatgtcggtgctgagaacggttgtttcagcattgggggaaaatacgtacacattccatccgaaaacagaggaagcaatccggctgattgcaatcacgccttctatcattgcatacagaaaaagatggacgcgcggtgaacaagcaattgcaccttcttcccagtacggacatgtcgaaaactactattatatgctcacaggtgaacagccttcagaggcaaaaaagaaagcgcttgaaacctatatgattctggccacggagcacggcatgaacgcatcgactttttcggcacgagtcacgttatctacagagagtgatttagtgtcagccgtcacggctgctctcggtacgatgaaaggtccgctgcacggaggtgctccttctgcggtgacaaaaatgcttgaagacattggagaaaaggaacatgctgaagcatatctgaaagaaaaactcgaaaaaggagagcgcttgatgggattcggccacagggtgtacaaaacaaaagacccgcgggcagaagctttgagacagaaagcagaagaggtggccggcaatgaccgtgatcttgatcttgcgctgcatgtagaagcagaagcgattcgtttgctagaaatctacaaaccgggacgaaagctgtacacaaatgttgaattttacgcagctgcagtgatgagggccatcgattttgacgatgaattgtttactccgaccttttcagcaagccgaatggtagggtggtgcgcccatgtactggaacaggcagaaaacaacatgattttccgcccgtcagcgcaatataccggtgccattcccgaggaagttctttcataacatattttggcgtttattcatttctgtcgtgtggtaacgttcagtatcaaccacatgtctaggagtgatgaatgtgaacccaatggacagacaaacagaaggacaagaaccgcagcatcaggacagacagccgggcattgagtcaaaaatgaatccgctgccgctgtcagaggacgaggattatcgaggaagcggaaaactgaaaggaaaagttgcgatcattactggaggcgacagcggaatagggagagcagcagctattgcctttgctaaagagggggctgatatctccattctatacttagacgagcattcggacgcagaggaaacacgcaaacggatcgaaaaggagaatgtccgctgcctgcttatcccgggagatgttggggacgagaaccattgtgaacaagctgtgcagcaaacagtggaccattttggtaaactcgatatcttagtgaacaacgccgctgaacagcatccccaggacagcattctcaatatttcaacagaacagctggaaaaaacctttcgcacaaatattttttccatgtttcatatgacgaagaaagctttgcctcacctgcaagaggggtgtgccattattaatacgacatcgattaccgcttatgaaggggatacggcgttaattgattattccagcacaaagggtgcgattgtttcctttacgcgttccatggcgaagtcgcttgcagataaaggcatcagagtgaatgcggtggcgcccggtccgatttggacaccgcttattccggcgacattccctgaggaaaaagtgaaacagcacggcttggataccccaatgggaagaccgggacagccggttgagcatgcaggcgcctatgttctgctggcgtctgacgaatcttcctatatgacagggcagaccattcatgtgaatggcggccgttttatttcaacgtaatcaacgaaaaaccagctcaagagctggttttttgtgtggtgaaaaatttcaaaataaaaaatttgtcgatttttctaacaattttgttttcatttttgcaattttatatataatattgagtaggagaaaggaatgattcgcgaccagtacaaatatagtagaaaaaaaagaataatgaccattgttactcatgaattcagaaaattcaaataaaatatataaaaatagatgatcgggagttgaaggggaatgaaagggagcgtttttaggaagaaaagcattcaggatttaatcgctgcgacgagcggggaaaagtctttaaaaagagaattaggggcatttgatttaacgttgcttggaatcggcgccattattggcacagggatttttgttctgacgggaacaggcgcagtcacggccggtcccgggctgacgatttcatttgttgtggcggcgttggcttgtttattcgccgccctgtcttacgcggaatttgcgtcaagtgtgcctgtttcaggttcggtgtatacattcacttatgcgacattgggagagcttatggcctttattatcgggtgggatttaattttagaatacatgctggcggtaagtgcagtgtcggtcggctggtctggttatttccaatcgtttttatcagggcttggcattcatcttccggttgctttaacagcggcaccgggcgcagtgaaaggcacctttaccctgtttaatcttcctgcattcgtcattgtaatggcgatcacatatttgctttatttaggcatcaaagaatcaaaaagagtcaacaatatcatggttatcttgaagatactggttgttctgctgtttatcgcggtggcagccgtttacgtgaagccgcacaactggcagccgtttatgccaatgggctttggcggcgtgttcagtgcagcggcgctcgtattctttgcttttatcggatttgacgctgtatcctctgctgcggaagaaacgaaaaatcccgcgaaggatctgcctaaaggcattattttctctttactggtctgcacgattttatatgtcaccgtatcagccatcatgactggggttatcccgtttgctcaatttgcgggtgtggatcatccggtttctcttgttcttcaaagcgcagggcaaaattgggtggcaggcatcattgatattggcgccgtgttgggaatgacaacagttatgctcgtgatgctttacgggcagacccgcgtcatgtttgccatgtcgcgtgacggacttgtgccgggttcactttctaaagtgcatccaaagcacaaaacaccttatgtagccacttggtttttcggaacgatgtcggcgcttctcggctcacttgttccgctggatgaacttgcaaagctggtgaacatcgggacgttgtcggcatttgtcctgatttctgtggcagttatcgttttgagaaagaaacagcctgatcttccgagagcttttaaatgcccgggagttcccgtgatcccaggcctggcgattctgttctgcctgttcttgattttaaatctgggatgggtgacgattgtccgcttcctagtgtggctgttaatcggcttggtaatctatttcctgtattcaagaaagcattcaaaattaaatcaataaccttttgataaagagagcggccatacaggccgcctcttttctgttcttggcaaatgaatctatagaaatgaagacaaaaataagagataatataggctggaaaggaagtgacgtttattgtctgagcaaaaaccagtccaatgggcttcgaaaattggtttcgtcatggcagcggccggctcggctatcggcttgggcgcgatttggaagttcccttacgtagcggggaccaatgggggaggagccttttttcttatcttcgtgttatttaccatcctcttaggctatccgcttttggtgggggaatttatttttggaagacggaaccagacgaatgccattgatgcatataaaaaagaagcgccgcgatcagcttggtttcttacggggtggatcggcgtagcggcgtgtttcttagtgctgtcgttttacagtgtaatcgggggatggattttgctgtatatcgtgaaaacagcgtcaggatcactgtccgggctttctcaagcacagtatggcgctctttttgcttctattatccaaaatccggtgcagacgctcgcggctcagcttgtctttatggcactgactgtactcgttgtcgcaagaggggttcaaaaagggattgaacgggtaagcgcggtgatgatgccgattttgtttttattgtttattctgctcgttcttcggtctcttacgcttaatggtgcaatggaaggcgtaaagtttctgcttgtgcctcatttcggcgatctgactccggaatccatattattcgcgctgggacaggccttctttacgttaacactgggggtttcggtgatggtgacctacagctcctatttgccgaaaacacaaaatatccctcgttcggcagcctccattgtcttgatgaatatcattgtgacactcttggcaggtttggctatttttccggcggttttctcattcggttttcagccaaatgaaggaccgacattgctgtttacagtgcttccggccgtttttgaacagcttccgttcggcacattgttttttatcggctttctcgttgcatttttatttgcagccttaacctcagcattttcgatggttgaaattatcgttgccacaatcggaaaaggggacgaaaagaagagaaaaaaactgtcatggacgagcgggcttttgatctttttggtcggaatcccatgctgcttgtcttatggcgttttgagtgatgtgcacctatttggcaaaacgttttttgatattgccgattttaccgtcagcaatgttttgatgccttcaggcgctctgttaatttctctatttatcccgctgaaaatttcgaaaagcgaactcttggctgaaatgcgaaatggatcaaatgcaggtaaagcattcttttacacatggttttatttgcttcgttttatcgtgccgcttgccattattatcgtgttcttaaatttaatcggaattttatcattttaaaaaacaggctccgtttccggggcctgttttttatttaataagatgatatcaacggtgcccatgccgttttcagtttttggatgccgagcctgatgtcctcttctgacaaaccgccataaccgattaagacagaagtaaaaggcgtctgttctatatatgagggagacacgggatagagggttacaccgtggtcagcggctgcttgtattgcttcttcctcacttgctggaaacaaaaggcgcagcagaatgtgaagccccgagttcttaccgagaatctcaacggtgtttcccagttcagagcgaatggcttctaacaggacagcgtgtttttttcggtataagcttctcattctatttatgtgtttttgccactctccggtttcgatgaagtctgccagtgccaattgcgagtgggcagaaacggtctgcttcattaactgaacattgttttggatcggttccatgagttcagggggcacaatcatgaagctgagccgcaaggaaggcagaagtgactttgaaaaagtgcccagatatatgactctgccattcggatcaagaccctgtaaagacggaatgggatggccgctgtagcgaaattctccatcgtaatcatcttctataatgaatgaatttgtttctgccgcccatgccagcagctcctgtctgcgggtaatcgtcataatggtcccaatcggaaactgatgcgaaggagtcgtatacatgagataaggattctgacggtagagctcatccggcaggacgccttctgcatcagaacaaatcggagtgacatccatgtgatttgcttcaaacatccttcttgaacggtgaaagcccggttcttcaaagccgatttttgtacctggctttagcgaaaggcaaagattttgcagaagcacggtggttcctgcgccgatgataatctggccgggttcacaatttactccccgagacagcctgacgaatcgggcaatcatgtgcctgagttcgtattctccttgagggtcgccagaggtgtgaaacgatccggaatagcgatcaagactttttactatgctttttctccatgcgttaaagggaaagagggtcggatcaacgctgccctgatggaagtcaatagcaggtgcgtttttttgatgtaatcccggctgtacagactgctgaaaatggtcaggagctgtcgggaatcctggttctacttccgccgcgaaccagccgattttcggcttgcttttgacatagccctcagcagttaattgctcataagctcgttctatagttgccgtgctgacatcgagcaagctggagagcctgcgttttgacggaagtcttgttccctttgtgattcgcgcatgtgaaatttcttgtttaaaaaaggtataaagctgttcatacagcggtgttttgctctttttatcaagaaacggcgtaatatccatctcatgtctcctttgtagctggcatggtcattttttctgatattggctatttggcaaatgccatttattagctatgatcattgtaacgaaaggaaaggggattgagaagatgatccatatgaaacaattaacctcgaaagaagaatgggctgagtcgtatccgattatgagtgaattgagaacagaactggatatagagacgtatttacaaaggcttgaagcctgtgtgcagaaagaatcgtatatgctgtttgccttatatgaaaatacagcaatcagagcgctgtgcggggctctgccgagagtttccattcataaaggagagcacttgtggattgcggatcttgttacaacggcaccttgccgatcaaagggatacggcaaaatgcttttggattatgcctcagactgggcgagaaaagccggactcggttttgtcagtctttcatctggccttcagcgtaaagacgcacatcgattttatacagataaaatgggttttactatagaaagttatttgttccgaaaaccggtataacgaaaaaagacgcctgaaaaggcgtcttttttaaaagccaaactgtaaattcgtatctacagatacaatggtatacacacaaataatcacaaagagattaaggatgacgccgagcaggcctggacctgtgcgccctctcttgatgaagagttcaacaacgccgaacggaacggcagccatggcgaacggaagcatttgataggaataaaacgtgacgttgctgataatggccaaattcagcaacagcagggacagaaccgctgtcccgacagagatccagccgaatacattgtgttctttaaaaattcttaccagttccataattccacctcgccgacattcgctgattttacagatttatttttcagcatgcgctggatttccttggttggccctgtaacgaccgaaccgtatacattgacaccgtttttctctacataatctaatcggttatctacattcaggtctttccgttttgaaatgacctgagcccatttttcgtgtttggacatgaatttcagggcgttgataaactgatcgccattcgacttgccttttgtattaagggcggccaagaactttgaatcctttccaggatagccaagaggttctgtggaagctgtcttatttgtgtttttctctgtttcgattgcgttccacaaaaagctcacatcatagcctttgaatttgttatacacgtcttttgtcggatatgcacggtcatatgaaaggtagacctctgataccgttccttcaggcaatgtgcttaacgttttttctgcttttgcggtcgtttgttcagacttgtttgaaggatgtgtaaagtaatggccggttttattcacttctaagtcatagtagtttactgccggcgcttttactttgttataaaacatttcaacccgttcattccctacggcagccgtcttcgtgccaatctgcttttgcagcgggaattccgtattcattccaaatagcttcacttggcttttcagtccggaagtatcaacaagaacattcggcatggtcagggctacagtgactgcggcagtttccataaactcattgccggtgctgtgttttccacccattccgtaatagaggtagcttcccagcgtacaaagcggcaaaatcatcaatgtcgaaatgacggcaagcacagaaattcgcaaataagacttgcgtttgccgtaggctaaaatcgctttttgtttttcaggactgatgctgagatcccaatcgttatcgtcctctagttcgctgtcaatcagttcctgatatacttcaagcttctcgagttcttcctcaaatgcagtcatttcctggtcgctcatttccccatttttatattgatcaaaacgctttttaaattcttcattcatcattaacacctctattataaagtgctttcagccgctgtctggcacgaaataaaacacttttaaaattcgcctctgaaatattcataatatgggatgcttctttgtagtttaactcttttaaataatatagcgttaaggcctcccgataattatcggggagctcggacatataaccagtcagcacttcctttatctctacctgatgggcaggactttgaacagcattttgaaagaggcttccgattaagtcatcagaaatggttacttctttcttatgctttctgacgtaatcaatgaaggcgtttcgcgccacttgaaaaagccagggctttactttgctgtgatcataggagtgaatgtgtatgtatgcccgcataaaggtttcctgcagtaagtcttcagcaagatgcttgtcttttgtcatggagagcaggaacctgtaaacatcattcatgtacatttggtaaatttcatcgatcgtcactgccttttctcccctctatgttatacacgcataagaaaggtttaaagttgcacattacatgcaaacggcttttttatacctaatcaaacaccattactatatagtacccaaaaatggccgcaaaagatagtgcggagaaaggtttaacattttttccagaggggaaaagatagtgaaaaagtgaaggagtggcacaatggaatataccagtatagcagatacaggaatagaagcctccagaatcggcctcggcacatgggccattggcggaacgatgtggggaggcactgacgaaaaaacatcgattgaaacaatccgcgccgctcttgatcaggggattacactgattgacaccgcaccggcttacggcttcgggcagtccgaggaaattgtcggaaaggcaatcaaagagtacggcaaaagagaccaggtgattctcgcaacgaaaacggctctggactggaagaacaaccagctgttccgccatgcgaacagagcgagaattgtagaggaagttgagaattctttgaagcggcttcaaacagactatattgatctttatcaggtgcattggcccgatccgcttgtgccaattgaagaaacggctgaagtcatgaaggaattatatgatgcgggaaaaatccgggcgattggcgtcagcaatttttcaattgagcaaatggatacatttcgcgccgtcgcacctctccatacgattcagcctccatataatctgtttgaaagagagatggaagagagtgtccttccttatgcgaaagataacaagataacaacattattatacggcagtttatgcagagggctgttaacaggcaaaatgactgaagaatatacatttgagggcgatgatctgcgtaatcacgatccaaaattccagaagccccgctttaaagagtatctttctgctgtgaatcaattggataagctggcgaagacacgttatggaaaatcagtgattcacttggctgtcagatggatcttagatcagccgggagcggatatcgctctttggggagcaagaaagcctgggcagcttgaggccctatctgagattacaggctggacgctgaacagtgaagatcagaaagatatcaatactatattggaaaatacgatatcagaccctgtcggaccggagtttatggccccgccgaccagagaggaaatataacaaaagctgagggcgaatcctcagctttttggcgtttaaacgagagaaatcttaaaaattagtaccaggtaataaaaaatattgttataatagatgacagaaagaatcattgattacgacaaaggaagtgcgatatgtataagttttgtgcaaatgctttaaaagttattctttctcttcgcggaggagtgaaggtgtataacaaagaaaaccttccggccgattcaggttttgtcatcgcgtgtacacattccggctgggttgatgtgattacactcggagtcgggattcttccttatcaaatacactacatggcgaaaaaagagctttttcaaaataaatggatcggttcgtttctgaagaaaattcatgcctttccggtagatcgggaaaatcccgggccaagcagtattaaaacgccgattaagctgctgaaagaaggagagatcgtcggtatcttcccaagcggaacaagaacctctgaggatgtgcctttgaaaagaggtgcggtgacgattgcgcaaatggggaaagcgccgcttgtccccgctgcatatcagggcccttcaagcggaaaagaattattcaaaaaaggaaaaatgaagctgattatcggtgagcctcttcaccaggctgattttgcccacctgccttcaaaggaaagacttgcagcaatgacagaggctttgaatcagcggattaaagaactagagaataaacttgatcagctataaggcgttctgagagattgtcctgaaactgtgaaaataagaaaagcaccctatacaaggtgcttttcttattatgcttcctgctggttagctgtctccagaagttcttcttcttgaagctttttcacttcaatatatgcgacgtggtggccgtcaatttcattaatgatgaattcgcagccctcttcgatgatggaatcatctttttcaacatcgtatttttgagtaaggaaccagccgccgattgtatcgacttcttcgttctctaaatggatgcctagcaggtcgtttacttggtcaattaacacttttccgtcaagaatataatggccttcgccgattttgcggatttcgctaatttcatcaatatcaaattcgtcgcggatttcaccgacaatttcctcaatgatgtcctcaaccgtcacaagcccggcagtaccgccgtattcatcagacaaaatggccatgtggaccctctctttttgcattttgacaagcaggtcttggatcggcgcagattcaatgacatgaatgatagggttgacgaattgagaaatggtggaatcaacagatacctcaccgctgatgcaggcggtcagcacttctttaatgttaataaccccgataatgttatctttatcgccctcttccacagggtagcgggtatatttttcaatctgaatgatgtccatcatttcagaaatcttgatatcatgcggaaggctgacaatttcggtccgcggaatcataatttctttcgcgagcctgtcgtcaaattcaaagattttattcacatatttaaactctgattggttgatttcaccgcttttatagctttcagacaaaatgattcgcagctcttcttctgagtgagccagttcgttttctgaaacggtctccaggccaaatgctttggtcaataaccgtgcggaattgttcaaaagccaaatgaatgggaacgcgatgcggtaaaaccaaatcagcggtttcgcaaacagcatagacactgcttccgccttttggatagcgactgttttaggtgcaagttctccgacaacaacgtgtaagaacgtgataatggcatacgcaaaaataaacgatatgacatgtgaaagggaacctggaacgttcatttggacgaaaagcgggtgaagcagcctttcgatcgttgattcacctaaaacccctaatccgatggaagtcaatgtaattccgagctgacacgcagataaatattcatcaagatgcgtggtcactttttttacggctattgctgctttatttccttccgcgatcagctgatcgatccgtgagcctctgattctgataatggcaaactcagatgccacgaaaaatgccgtcagggcgattaaaacagcaactaaaatcaaattcactatgtccaattagaaccttcactctagcaatgagaatgaaggtaacacctcctgttagataaaatggttttaacttaacagcagcataaatgattggaacacggcgagcttttcaggcgggagtttgcttttcagcttgtcacgatcctcgggcttcagccgttcaaaccgatgcaagattccggagatgttttgattcatatgatcaatttctaatgccagatttccaatttcatcatcaagtttagctgaagagggaaactggttctccagtcgatctttaatatcggacagggccaatcgctgcttcttgcaatctacaataaatataagtcgtttgagtgcattttcgtcgtagtaacggtaatttgaacaggatctggccggcgtaagcagaccgagattcgtataataatcaactgtccgtttcgttactccggcgagtgccgctagttcactgatgcgataagtctcagccccatctatatccctcccaaccatcacgttatagttatgagaatagtttaatatatgaacggtgtcttgcacaagtttattgttttttttagaccggaattggaagttgtggaattcatcatctgattgaagtaacataggaagatagaattttcaaatttttatatgcggaagggacagatgaaattggctgggttatcccgggaagttgaagaaaacttaaataaaggatcatggattcgcaagctgtttgatgaaggtgcaaggctgaagaaggagttcggggaagaccaggtatttgatttttcactcggcaacccgattgttgaaccgcctgaagcttttaagagagcgttaatagaggaagctgaaaaaggcagccacggatacatacaaaaccaagggcttcttgcagcgagagaaaaagtcgcgcaatttctgggctcgcgttttgaagctgatttctcagcggagcgcatcgtcatgacggtgggcgcgggaggcgctttgaatgttgcgttaaaaagcatcgtaaaccctggggaagaggtcattattcttgcaccttattttgccgaatataagttgtatattgagaactacgggggaaaagccgtcagctgcccgttgacaagccggtttgagatcgacattgaagcggtaaggcaatcgatcactccacagacgaaagggctgattctcaatacaccgcataaccccacaggcactgttctcagccagaaaaatatagacgatttaggcgctttattaaaagaaatagaagagaagagcggccagacgatttatgtgctgtttgatgaaccgtacagtcaattaatctatgatgaagagctggcaaatccgtttcaatcgtaccatcgtgtgatattggccagctcattcagtaaagatctcggcatagccggagagcggctcgggtatatcggattggacagccgaatgccggatgcggaccttttgatcaacgcttttgtgtattgtaatcgaacgcttggatttgtgaatgcccctgtcatgatgcagcgggctgtggcacgaatggatgatttaagagtagacgcgagcgcttataaagagcgccgggatttaatggtagacattttaaaagaagccggttttgaatttgaaatgccaaagggaggtttctttgtttttccgaaatcgccgattgaagatgaagttgcattttgcgtgcatgccgcccaaaaatacaaattattaattgtgccgagcagcggttttggaatgagcgggcatttccgattatccttcagtgtgccgatcgagcagattaaaaactcacgggacattttcatttctttatataaagattttgcttaagaaggcaaagaaaagaaaacagttttcaaggctgttttctttttatatccgcaaaatccttcctcttccaatccagacaggcgcagaattgacaagcaggcatgcagttaaggctttcttcatgataaaagtctaaaaattaaaaatcatttttggaatgagttgtgttacaataaaatatacaatttataatcaaactttgacttttggaggtggtatgatggggccctctgcttaggcaacaatacaccgcgtacctcaatgttaaggaaaaatgattatatcaggaggtgactccttatcctttgttgagaggatagggttaaatggacgatattgacagtctgattttaattggcgtgctcattgctttaaccgcgtttttcgttgcaagcgagtttgcgattgttagagtgaggagatccagaatagatcagcttatcacagaaggaaacaaacgggcgatactcgcaaggcgtgtcattacagatttggatgaatatttatccgcatcccagctaggcattacattgacatcaatcgggcttggcgtactgggtgagccggcctttgaacggctgctgcatccactgtttgaaccgctcggcttgccggactcggtttcacatgcagtctcttttgcagtcgcgtacggcttgatcacgttcctgcacgttgttgtaggtgaactggccccgaaaacggtcgcgattcaaaaggcagaacagctgactttactgatagcgggccctttgcgtttattctatttgctcctgtttccgtttatttggatcctcaatggatcggcgcggcttttatgcgggatgttcggtttgaagcctgcgtcagaacatgatggttcccattctgaggaagaactcaggatgctgttatctgagagtttaaaaaacggagagattaatccgtctgaatataaatatgtgaataagatttttgaatttgataatcggatcgccaaagaaattatgataccgcggaaggaaatggctgctgtgtcaactgagatgacgatggccgagatgcttgaagtcatgctgaaggaaaaatacacgcgctggccagtcacagatggagacaaagacagtgtgctcggtttggtcaatacgaagcatttgttttctgatttgctgtttatgacagaagaagaacgaatgaagatgacgatccatccgtatgtgaggccggtcatcgaagtgattgaaacgatcccggttcatgacttgctgattaaaatgcagcgcgagcgcattcatatggctatattgtcggatgaatacggaggaacctcgggacttgtgacgacagaggatattcttgaggaaattgtcggagagatccgagatgaatttgatgaagatgaacagccgctgatccaaaagcttggcgacggccattatgtgatggatggaaaggttcggatcgatcaggtgaacagccttcttggcgcatcgattcaagaagacgtcgatacgatcggcgggctgatattaaaagaaaacatcgatattgaggctggtgaatccattcgcatcggttcatatacgataaaggtgctgaagatggacggccgattaatcaagcaaatcgatataaaagaagaagccggcaacacaaccgggattacggcgcaccacaagctgccgctgcccgagcctgtgatgctgaacagtgcaaccttgagcgagaaataagctcaaggtttttttatattgtgattgtccagccgcaccaaaatgcaaaaagcgacccgcaaagtgtcaggacgatgtacaagatgctttcttttacacgtttggccataaggagttgaatagtttcaacgctgaatgtggaaaaggtcgtaaaggcgccaaaaaaccccgtgccaatgataagcgagaccgaagcatttgcaacgtgaagtcctgtaaatattccgagcccgagagctccgagaatattgactgtcagtatgccaatgggcaggctgagacctttggttttggcggttatgacattgccaagccagaagcgaagcattgcgccaagtccgccccctatgaaaatacccgctagtgtcatttttcctgcagcccctttctttgctgaatgcctgctatgcgccgtcccacaaaaacaccaatcagtgcaaatatgatccctgatatcaatgaggctgccacatataaaagagccaatgagggttgtccttgcaaaagcatcactgtttccttagaaaacgtggacattgttgtgaagcctccgcaaaagccggtgcctaaaaaagccgacagcagaggccgttttgccccgatcataaaaaatccggtcaaaatgcctaatagaaggctgcctgccgcattttccagccaggttgccgccgggaactgaccggtgtgtatccataagtttaatccgtatcggaggcaggcgccaagcgcgcctccgataaaaaccgcgctatatattttcatgtttgccatcctttatgatgaaatccgggtaatctgtaacgatgccgtccacgcccatggcttgtaattttgccgctgtcttttgattgttgacagtccatgcaaatatgtttaagccatttttattgatggagccgatcatcagacggttaagccgtgtgtgttttatattgacatagtttgcaaaagagcggaaggccttcatctgatttctggacagcatgccaaagttgggccttgtaatgaccgctgtcggaatcgaaggataaagctcgcggaacctttggacggagcggaactgaaaggattgaacaatattattgatagaaaaagaaaattgccctaatagctgtcccacctcttcttcaattccgacttgagacggatggccttttagttcaattaaaaggccgatttttttgtggtagcgcttgagcaccgcttccagggttggaatacgctctccttgaaaagcgggaccgtaccagcttcctgcatcgagtttttgcaattcctccaaggtaaaatccttaacaaagcccgatccgtttgttgttcggtcaaccctgtcatcgtgtatcacaacaatctgcctgtcttttgtaagctggacatccagttcgatcatatctgcattcattttcaccgcaaggtcaaatgcggcaatcgtattttccggagcgtagccggatgctccgcgatgggcaatgatgtacaagctaagtcagctcctcgtatgggcatttctgttattgtatcaaatccatatatgcaccgcgatacaaactggtgaattttttctgccatatcggaatggtccgggctgaggaatgcgtataactaaaaaaagacactcagcgtatcagaacacatttcgtcagaaaattaggtctttcgacatgttcacaacaaaatatgatcctttataatagcaaaaaaggaggcgagatcatgggaaaagggagaatcagagtggaggaaagaattaaagccgaaacggatgctgaaatgcaaaaagcaactctccttgatcagacacaaacgaaaaaaggtaagtgactgtccctattgaatctggctgatagatgaattgagaaatgaccccggcgtttcgccggggttttgtgctgcataagacatttaaatgaacatccttacgaatattttagtataataaacaattgattgggatagaggggagacagtcatgccggattatctgcagcagtattttacgcttgataacatcatacaaatcggcatcagcttggcgattttgctggtgtttcttatacttagaaaattattcacaagatatttttttaacctgctttttaatttgacaaaccggccgaaaacagaaatttttaaacaggtggttctggcgtttgataagccggccagatggttttttgttgcccttgggctgtttttagcgatccggtattcaccgtttttagatgagcaaatgccggtcatcagcaaaatataccgctcactgattgtggcgctcttgtgttggggtctttgtaatttgaccgcaacatcgtcgtttatcttccataaggtgaaccagcgcttcgagcttgacatggatgacattctggccccgtttttatccaaattgctccgttttgtgatcattgcgctcagtgtcagtgtgatcgctcaggaattcaattatgatgtcaacggatttgtagcgggccttggtcttggcggactggcttttgcgcttgccgcgaaggataccatcagcaacttcttcggcggtattatcattattactgaaaagccgtttacaattggtgactgggtggagacgtcgacagtaacaggatcagtcgaggatattacctttaggagcacgagattcagaacagcacagggggcgcttgtaacggtgccgaactctacgctgtcgatggaagcgatcacgaactggacaagaatgaccaaacgccagattacgttttccatccatgtgtcctacgctacgccgattgagaaccttgaacgctccattcattctctcagaacaatgctcttagagcatgagggcgttgataatgaaataatcatggtcaactttgatacgtttgccgacagctactacaatttattttttaacttctatacaaaaacgacggtttgggctgaaaaccttaatattagagaggatatcaactataaaattattgagattttaggtgcagaaggcgttcagtttgcatatcccggccaaatggttgttgtcaagcaaaagcacgaaagcgaccaattccaggtgaatctaaataaagaggaaaaggaacgggcttaaaagagagacttcgtctgacagaggcggagtctttttcatggtaaaataagagaaaaaggcggtgttgagttggaaacattcaaaagtattctacatgaagcacagagaattgttgtgctgaccggagcgggaatgagcacagaatcagggatccccgactttcgttcagcagggggcatttggacggaggatgcctcaagaatggaagcgatgagccttgattattttttaagttatccgcgtctgttttggcccaaattcaaagaattgttccagatgaaaatgagcggcagctttgaaccgaatgaaggccatttgcttttagctgagctggagaagcaagggaagcaggtcgatattttcacgcaaaacattgacggtcttcataaaaaagcggggagcaggcatgtgtacgaactgcatggttctatccagacagcagcttgtccggcatgcggcgcccgatatgatcttccccatttgctggagcgggaggtgccggagtgcacggcggccggaaacaatggggacatttgcggaacggtattaaaaaccgatgttgttctctttggcgatgccgtcatgcactttgacaccctttatgaaaagctggatcaagcagatcttttattggttatcggcacgtctctcgaagtggctccggctagatttgtgcctgaggatgcaagcctgattcccggcatgaagaaagtcatcataaaccttgaaccaacgtattgcgacagcttgtttgacatggtcatccatcaaaaaatcggcgagtttgcccgaagtttgggcatgaaaaagtgagccgctttatgcgcctcacttttttattcatgaacaggaaccattgtgtcctctaacactccgaaggaatagcctttttcttttaatttattgattagtaccggcagcgcatttacagtagcaggaagatcatgcatgagaattacatttgggcggcttgaagagctgtgttccatattctcaagctgctgtaatacggcggtcacatactgtgaattccggtatttccagtccatgctgtcgatcgtccaatcccagtacacaaacccatctttctccagattgcgaatttgtgaggcggttagtgacggcttgcttccgtatggcgttctgacaagatcggttttatatcctgtaatgtcctgcagcgtgtcacgcgcctcctgcatttcttttagcggagatgtcggtgtttgatagaacaatctgttattgtgggtaacgccatgtaaaccgagtgcgtggccttccttttctgctcttttcacagcctgcttgaattcgttcatccgcggtgacagcataaaaaacgtcgcttttacatcagcgcttttcagtacgtcgagcaagcgggttgtaacggctgaagggccgtcgtcgaaggttaagtaaaccgttttatctcccatgttctgctttgtctgcagatgttttatcaggagatcgggggagtcgtttttcagcttaaggctttccttctcatctcgaagctggccgtttgttgtgacagtgacttcctttgctttcgttgaactgttggaataacccaaaatcaccataagcaaaagcagcacacataaaactgctaaacttgcaaatttaaaagcaagcgaaactgcagaaggagaagcctctcctctcgtttgtcgcataacaatctctccattggcataaaatctctacataatgctgtacagcaggcagcttatgaagatgccttatgtttacaacctatgtattaccagtcaagtatacaggaataaaactggaaagcacatagaaaatttgtcgaaatgtcagattttaaggaaaaaataaactcctttccgctatagatctcttgatctttctgtttttcagcttgtccaatatggtagaattagtgataatgacagcttgaatgacatcagggacatctcgaaaagggagggcttttatgaaggttttagtcaatggccggctgattgggcgcagtgaagcatcaatcgatttggaagatcgcggttatcagtttggtgacggcatctatgaagtgatcagggtgtacaaaggagtattgttcggcttacgtgagcatgcagagcgttttttcagaagtgctgctgaaatcggaatttcactgccattcagtatagaagatctcgagtgggacctgcaaaagcttgtacaggaaaatgcggtcagtgagggagcggtatacattcagacaacaagaggtgtggccccgcgaaaacaccagtatgaagccggcctcgagccgcagactactgcctatacgtttacggtgaaaaaaccggagcaagagcaggcatacggagtggcggccattacagatgaggatcttcgctggttaagatgtgatatcaaaagtctgaatttactgtataatgtcatgacgaagcaaagggcctatgaagccggagcatttgaagccattttacttagggacggcgttgttacggagggtacatcctctaacgtttatgccgttatcaacggcacagtgcgaacacatccggctaatcggctcattctcaatggaattacacggatgaatattttaggactgattgagaagaatgggatcaaactggatgagactcctgtcagtgaagaagagttgaaacaggcggaagagatctttatttcgtcaacgacggcagaaattattccggtcgtgacgctcgatggacaatcgatcggaagcgggaaacccggaccggtgaccaaacagcttcaggctgcttttcaagaaagcattcaacaggctgctagcatttcataaatgaacgaagaaaagagcccgctttttacagcggggctctttttattttttaacaaatccaatcaaaatggagatcattggcgatatatagaggaagaacgtaaatgggatgtagtctatgactggaacaccaagtgcgctcgccataaatgcgccgctgacgccccaaggaatcaatgggttaattaatgttccgccgtcctctaatgatcttgtcagaaattttcgctggatgtttcgtttgtcatataaagatttaaatgattgtcccggtattaatatcgataaatactgttcgcccgttgccaagttgacgccgatgcttgagcagacagttgctgcaacaagacggccttttgagcggatgcctttcatgacgccttccaatagtgcagaaatcaatccgattttctccatcaatccgccgagtgcaaaagcaatcataatgagagagacagagcccatcatggattgcagtccgcctctgttaataattttagcggctgcctcattgtcagtttcgaaagttgtgccattttgtaaagctgtcataaacgcctgcaggctgctgtagggtacaaaaatagcagtcaaaattcccgaggaaataattccggcagtcagaacggggattactgatacccgtttcattgccagcaaaacgactaagagcggagaaagaagggcccacggtgtcacgtttgcagcatcttttattccggttatgacctgctgaatattatcggttgaagcagcgtccgctgacactgatgaaccgagaaagtaaaacagaacgacagtgatgagcaaagctggaatggttgtgcccatcatatggcgaatgtgttcaaagattggtatttcgcctattccggctgcaaagttggttgtgtccgacatcggcgacattttatccccaaaacaagcgccgcatatgactgcgcctgctgtccattcaagcggaacgccagccgcgctcgccacgccgatcagcgctactccgattgtgcttacagttgtcagacttgagccaacaagtgtgctgatgatcatacatgaaaacaaagcagtcaacagaaggtggcttggttcaataaaggatagggcataaactgtcatagtcggtattgcgccgctgtacatccaggcgccgattaagatgccgatcagcgctagaacaataatcggctgtacgccgtttttgatcccgtctacaatccctttttcaatgctcttccagggaaatccaaaccataaagctgctgctgaaagcatgacaacacttaaaaacagcgggatatgaggttctacatgaagcaagaataagcaagaaataataatgcacaacatgaatataaataaaccgacggctaacggaaacgtcagctttttttgagaatccaaaataacaccccatatttatctttaatgcttttgtgcttttgggcacgaaagcattataacagaaaaaaacgaaaatctatgttttttcacaattatgaatataaaagaagtgagcacagggcgtgctcactttacaatcaggacgggtatatccgatttcgctgaaagcttttcacttacacttccgaatattagctttttcagcctgttttggtctctgcttccggttacgatcatatcggcagaaatgcggtttgcatgctcgataattgattcagccggatcgccttctaatatatcgatatctccatctgcctgctgttcattcagcatcattctggcttcggcgatgacttcttccgtacggtcttcatagatcattggctcaggtgatgttacatccgatatcagcggatcaggaacacttgtcatgcctccgctgatatagcttgcctcagctgcgggtctgggcgggtcgatgacggtctgattgtctttcatatcatgtgaatgggcgacggtaatagcggcatttacggttttagcaagatcaatggctgtcagaagcgctttcttactattttcacttccgtcaaacgcaacaatgatacggtcagcatggaacatccttctcaccctttcaaagcgtcttacaacactactacccgaatttgagcacaattaaccttttcctattcaagtaatgattgacaataaaaggttttgtttatatgatgataaaaagatgaaatcagaatggaaggagggtttgctatgccaaggaatttgcgtgtttatcaaacagtttcatattggcgcggcaaaccttttgttctgttttcgtgaacggttttttaggtcggaccgcgcgctgaaaagcgctgtgcgtaacatatcggttaaaaaaggcatggagctgacgcttcatgccttttttatatacaaaatctaaggaaagacaggtgtatgggatgtgaagacaaatacagaggcgagggcagttcgtgccaaactggatgaaaaaagctgcaaggaaaaaatagaaggcggctgatgaggagatggggatagatgttttcagttttgaaaaagcttggctggttttttaaggcgtactggctgcgctatacgattgcgattgtccttttattagcagtcaatgtcattgaaatgtttccgcctaagctcttggggaacgccatagatgatatgaaagcaggggcatttactgcggaagggctgctgttttatatcggtatcttttttgtgctgacggcggccgtgtatatcatgtcttatttttggatgcatcagctgtttggcggagcgaatctgatggagaaaattcttcgtacgaagctgatggggcatttgctgactatgtcgccgccgttttatgaaaaaaaccgaacaggcgatttaatggcacgagggacaaatgatcttcaggccgtcagtttaaccacagggtttggcatcttgacgttagttgattctacgatgtttatgatgacgatctttttgacaatggggtttttgatcagctggaagctgacctttgccgccattatcccgcttccagtcatggcgattgcaatcagtctatatggaagtaaaattcatgagcggtttactgaggcccaaaacgcgttcggggcgctgaatgacagagtgctggaatctgtttcaggcgtgcgggtgattcgcgcgtatgttcaggaaacaaacgatgttcgccggtttaatgaaatgaccgctgatgtttatcagaaaaatatgaaagtggcttttattgattcactgtttgagccgacggtaaaactgcttgtcggcgcaagctatctgattgggctcggctacggagcgtttcttgtattccggaacgagctgacgcttggagagttagtgtcctttaacgtttatctcggcatgatgatttggccgatgtttgcaatcggtgaactcattaatgtgatgcagcgcggcaatgcgtcattagatcgggtaaatgaaactctttcttatgaaacggatgtgacagatccaaaacagcccgctgatcttaaagagcctggagatatcgttttcagtcatgtcagctttacatatccaagctcaacaagtgacaatcttcaggatatttcatttacggtgcgaaaagggcagactgtcgggattgcaggtaaaaccgggagcggaaaaacgacaattattaagcagcttttgcgccagtatcctccaggtgaagggagcattacattttcaggtgtaccgattcagcaaatccctcttgaccgtctccgcggatggatcggatatgtgcctcaggatcatttactgttttcacggactgtaaaagaaaatattttatacggaaaacaggatgcaactgataaagaggttcagcaagccattgccgaagcacattttgaaaaagatttgcacatgcttccgtccggtctggagacaatggtcggtgaaaaaggcgtggcactgtcaggcgggcagaaacaaagaatttcgatcgcgagagcactcatggcgaatccggaaatcttgattctggatgattcactttccgctgtagatgccaaaacagaggctgcaattatcaagaacatcagagaaaaccgcaaaggaaaaacgacatttattttgacacaccgattatccgcggtagagcacgctgacctgatccttgtgatggacggcggcgtcattgctgagagaggcacgcatcaagaactgctggccaataatgggtggtaccgggaacaatatgaaagacagcagctgttcactgcggaagaagggggagcaggggcatgaaaataggaaaaacgttatggagatacgcacttctttatcgaaaattgctgatcacagccgtccttttgctaactgttgccgtcggtgcagaactgactgggccctttattggcaaaaaatgatagacgaccatatcctcggcattgagaaaacatggtatgaagctgcggaaaaagataaaaatgccgttcagtttcacggcgtctcatatgtcagagaggaccgattgcaggagcctgtttcaaaagcaaaagaagcgcatatttatcaagtgggaatggcgttctattttgttgatcaggctgtcagcttcgacgggaatagaacggtttctgacgggaagctgacgatcacaaacggagacaagagccgggcatatgctgccgaaaagctgactaagcaggaacttttccagttctatcagccggaaataaagggaatggtgttactgatctgcctgtatgggggcttgcttgtgttttcggtattctttcaatacggacagcattatctgctgcagatgagcgccaatcggattattcaaaagatgaggcaggacgtgttttcgcacatacagaaaatgccgattcgctattttgacaaccttccggccggaaaagtcgttgcgcggattaccaatgatacggaggctattagggatttatatgtcacagtgctttcaacatttgtgacaagcggaatctatatgttcgggatattcacggctttgtttctgcttgatgtgaagcttgcgtttgtatgtctggcaattgtgccgattatctggctgtggtcggtcatataccggagatatgcgtcatattacaaccaaaaaatccgctcgatcaacagtgacattaacgcaaaaatgaatgagtcaattcaaggcatgaccattattcaggctttccgccatcaaaaggaaacaatgagagaatttgaggaattaaatgaatcacatttttatttccaaaacaggatgctgaatttaaactccttaatgtcccataatctggtcaatgtcatccgcaatcttgcgttcgtctgtctgatctggcattttggcggtgcgagcctgaatgcggcggggattgtttctatcggtgtgctgtacgcgtttgtcgattatttgaaccggttatttcagccgatcacaggcatcgtcaatcagttttcaaagctggagcttgcaagggtctccgccgggcgtgtttttgaactgcttgaagaaaagaatacggaagaagcgggtgaaccggcgaaggagcgcgcgctggggcgggttgaatttcgtgatgtgtcatttgcgtatcaagaaggtgaagaggtattaaagcatatttcctttactgcgcaaaaaggcgaaaccgtagcgctcgtcggccataccggatcaggaaaaagctcgattttgaatcttctgtttcgtttttatgatgcgcaaaaaggtgatgtcttaattgatggaaaaagcatttacaacatgtcaagacaggaactcagatcccatatgggtattgtgcttcaggacccgtacttattctcgggcacaatcggatctaacgtaagtctggatgacgaaagaatgactgaagaagaaataaaaaatgcactgcggcaagtcggtgctgagcctcttcttaagaagcttccgaagggcattaatgagcccgtgattgaaaaaggcagcacgctatcctctggagagcggcagttaatttctttcgctagagctttggcgtttgatcccgcgatcttgattttagatgaggcaacggcgcatattgatacagagacagaggccgtgatccagaaggcgcttgatgtcgtcaaacaaggacgcaccaccttcgtcatcgctcaccggctttcaacaatcagaaatgctgatcagattttggttcttgataaaggagaaattgttgagagagggaaccacgaggaactgatggcattagaaggccaatattatcaaatgtatgaactgcaaaagggacagaaacattccattgcataacgctcaaaaacccaaaacaatcgtgttttgggtttttggtttatgtagtcaataagccagtccgacacggtttccgacatactcacctgtaacgagctcacgatataaaaagtccgcagtatcgccgaccgaaatgcttgtgccgccctcaggcaaaacgttacgctccgtacgataaacgccggttgctgttccgtccgggaggtaagtggggcagatgattgtccagtctaatgatgattctttaagcatttcgtatacttttgcatgctccttggctgcgcgggtctgctttcgtttcgattcatttgtttcaaaccggtattttcccggttcatatcgggaatctaggatccctgcggtgccgatcgtaataagccgtttgatatgctgttcctccataacggagagaatgtgtgccatagcagttgacaaggtatcatcaccatctgtgcctagacagctgatcacgatttcagcattctccattatttttttcacatcttctaagcggcgggcgttccccatgacagttctgtcttttgaaaggggaagatcagcatgttgagatctgatcagagcgaaaatatcaaatctttcatctgctgcagcttgtgttaaaaaggcttgtccgacgcggccgctggctcctaataaagcgattttcattaaaaaacctcctcgcctttcattataaaaggatgttctcagtttgaacagcgcgggaaagaatacctgtacaaataaacagaacgatgggaaacatattcatgaatcatggatacacttacgaattgaaccagctcccaattcacaatggtgatgaatgacaccccgattccctccctttttttctaggatatgtggagcaggaaaaaagggtgacaaaataaagagagcgcggaaaccgcgccctctatagccatatattgaattgttattgaactctgccgcccatttgctgctgagcgaaagatactaaacgttttgtgatttctcctccgacagaaccgttagcgcgagaagttgtgtccgctccaaggttaacgccgaattcagaagcgatttcaagtttcatttgatcgatagcctgagctgcgccaggaactagtaagtcatttgaagagttttggttagccatgtgtaaaatctcctttttatttagtatggttgggttaactggagttgcaccaatctgtgaacccttctcgggtgtcactgccgcctcggcgtaacccaatgctttgccggcttgttactacgtattatgttaaaatggccggaaaatcatgcggagaattgtgtggtaaatcttgagaaataaaaaaagcttagccgtttaggctaagctagtcataaatatgaaaaagcatcagttcatgtatctcgtttgtaagagcaggctcgtcagcgcgggcgggaaacaagtctccccattcaatctcaccgctcttatgatagatgccttcataatgggtccctttataataaaatgaaattttccatccgggcagcttttcttttgggaacaaaggtttccagctgaaatgagaaatcattacggccacgctccttacatttggtatcaattgacctaaataaaaacggcttatgttcattgtatcattgtttcagaacatcattgaagaggcctaaatatgcagtttgtcccagctttggataaagataagcccgctttattaaaaaagcggacaggttacgaaggccacaatgcttccggagatgtgattgccttctcagataaatatgacgcgtattcaaaacttcttcgttttgtaagagaatcaacatgatgcaaatttggatgagaaaaaatgcttcggcccgggcgcgaattcgcttcaaacatccatactttaccgttctgatcaatgccaaaatcgaaaccaatctccccgataaatccctcgatatgatcatgaaggacatggcttgcagtcagtgccgctgcagaaagctttttaatgacctcaactctttcagcgggatcatcgtatacttccgcaagtgtctttacagtgccgccgttagaaagatgtgttgtaatgctgttctttccggaaatttttacggcgattgctgtcactgtccattttccttttctgtttttattggtatggacacggaaatccgctggtttgccttgaaattcgatgagatcaacaccttgctgaatgagaaagtcggacgggttgtgatgtttttgaaattctgcaaggaatgaggcggcatcggaataatcaattgatgtaaaagttttggcgtcattcgtatgctttaccgtcaggccgccatctgttcttgtcagctgataaatgccggtgccgagtgctccatttgccggtttgatatagacttttttgtatgcgccacagagctcatctatcagctccacagacggtgtcagctcggatctaggcaaaaagggtgccgttcttggatctttttcgagcaattgatgaacgttccatttattgaaaaacgttttattaaaccatgggatctgatattcatcgatcagcctcttttttgtatgttgcaagagaagtgaatcttcaatttttcggttcggcaaacggtcataaacgacgttcggcaatggaacgatttttttctcccagccgttttccctgtaaaggaggccttcaatcgtgccttcctcccaattgatttggtgcgcgccaaaaacgaagcagtagcccccggcttgctcgtgtaacgtgacaagtttagaaaaaaagagggaacgatccttaaatgggcgttcaagagatacagtaaaccctgccgtaaagatgccgactaacggcccgatatgcactgtatgatcatgaatcagtatatctgccctgcttcggtggggaagcaaaagctcatgaaacagattttcagagagaagcacggtttgttccagatgccgtctgtaagcaacgtggcatctgacaaccttcgttccgaatgcggcatgcaaaagtccgtcttgcttcagcgaagagggcagaaacagggtgttttcactggttttgtctatgccgatcaaaaaccgtttaggattcacgcggaagaactcctttctggctttgctcagaaaacagatattggcagcgttttaggggacaagtgtacagctgttctttttgctcgggagagacacgcaggattgacttcctgcctggtttggaattgatatctaaaatccaaattctcccgtcctttgcaagacatatatcaagaccgagttcaaacaacggcccatagcgctcgtcaagataatacggaaccgattgggtaattgaaaacacatcatctagtaaaaccacttgctgttttttcggtatatcttcaaaccaggagtcaaatgtcagcgcatcagatccgcctgacaaattggccagcagcccgtgtttgtatccgcgtcttactgcctttccgactgtattccattcacctgcttcgtttttttccataaacagacgaatatcacaagggtattgttccttatcttgaatgtttaagtaaggctgaagcaaatattgatgctgaagcacttttttgcaccatgttttaaaagaagtctggttggaaaacgtttttgtctgcttatcctttccgatgtgataagtagcagtgatgtttttcttgcccagcttcaaaagaatcacgcctctgcctcccgcgccgaatgccggtttaaggatgcaggctttttctttggataaaaaggagtgaatttgttcgtagcggctcacctttatcgtttcgggaatatagggattgattacagagtgctgctgcaaatcgtgaaggacggtccacttatcgggaagaccccgcccgataaattccgttttcggatattttttgagccactcaacgattggttttgctttttgggaatgtgaatccttgccgtaaaaacagcgatcataaatataatctggaatcgccatttcagtttcgttccatgtgctgctggccgaatgatagaccgatgctttgacacgcaaagtgtcaggtgaaatatcaaatggtgtaaaccggatgaaacgtatgccgaattcgggtgctcttttggccagttctgcggaataatccgcttcatgctggcgggataaggacataaaaccgagtgttatcatggtgagactcccccttttattcaaaagctgccggcgggtgtccgcagctttacactaaatacatgtaagacgaacgcagctgacggtattctactttacagaatacgattctccaccttgccctattccaaaagaacaagctgattttctaagaacaggaatttgtctcctcgtttgctaagtgattgcatgagcctctataatacgtataggtacataatctatatgaaaaaagctgaagcacagatggaggaagatgaataggaatgggtattgcaggaacctttatttttatgatcgtgatcggcgctgccattggagcggtgaccaatcatttagcaattcaaatgctgtttaggccgtataaagcgtactatttgtttgggaaacgagttccttttacgcccgggctgattccaagacggcgagatgaacttgcaaaacaaatgggactgatggtagtcaatcatctcttaacccctgaaggcattaaaaagcggctcgtctctgatgcagccaaaacgcaggctcttcgagtgggggaacagctgattcaaaagctgtcactttctgaagtgacagtaaaagaagcgcttgaaaaagccgggatgaagcgccccgaaaaagctgctgatgcatggatcagcagctggaccgatgataagctgcatgagcttttccgccaatacggggaccaatcgttaaaagagctggtgcctatagaggtgcaggaaaagcttgaggaaaaaattccgatgatttcaggatatatattgtcacggagtgtccgttattttgaaagtgatgaaggaaaaatccgtcttggcaatatgattgatgactttttaaaagagcgcggcatgcttggaagcatggtgcaattgtttcttggcaattcaagccttgcggatcgcgtgctgccggagctgctgaaattcttgcgcaatgaggaaacaaataaattgctttctgatctcttaaaaaacgaatggggcaagctgagggagtatacgtttaatgaagcagatgaaaaatggaatgcaaaggcgctcattttcagtttgaaacgaagagtgctgcaagcattttcgactgcccctttcttcaacaatacgattggcacgcttaccgtccgctatgaatctgagctgacccagcaaatgctgccggcactattagacaaattgcttgaaggtatttcgtccaaccttgaaagtgtcttaaaacggttgcgtcttgaggaaatcgtcaaggagcaggtggatcagttcccggtggagcgtcttgaagaaatggtgctgtccatttcaaaaaaagaatttaaaatgattacctatttggggggccttctcggcggaattataggcgcgattcaagcattgtttgtcatccttttttaagaagaaatggtttttgattaatgaaaggagctccatagtctgttatagtggagtggtatgtcaaacggcaatgatgaaaggagctatttacaatggctgttaatttttatgatgtagcgtatgatctggaaaatgcattacgcgggagcgaagaattcacccgtttaaaaaacctttacgacgaagttaacgcagatgaatcagcgaagcgcatgttcgaaaacttccgtgatgtacagcttagactccagcaaaaacaaatggcaggagaagagattacacaagaagaagtgacgcaggctcaaaaaacagttgcgcttgtacagcagcacgaaaaaatttctcagctgatggaagcggagcagcgcatgagcatgctgattggtgaattgaacaaaatcattatgaagcctttagaagagctttacggcagtgttgaaggctaataagcaaaatcccttcttggataagaagggattttttattcactcagcaaacttggaaatccaatgaatcttttacctctccattgatgatgactgataatgtatgaattcctttgtaatgctttctggtggttaaatccttaaaggattggattcttgtgtatgacttcgtttcgttttttcgtatatttgtttctgttattttaaatactttctgatgacgctggcctcttgcttttacaaaatcaattgcgtactcaattcttactttttgatccctgtctgaatgaatatagaaagaaaattcaaggctttcgccaataactatacgtttgggctggcatgttaaatcatgtagttgtatcgaatcagcattttcataaccaaaaagcgctaaggcctgtttatcacccttttttaataaggtccgataggcgtgtttgataatccagtctgtatggggatgtgttccgtaccattgatctgcgacttttctcagtaaatgaggatgcgtttttgatatatcattaaggttgttggccacgctttttcttacatataaagactcgtcctgcatcagcttctcaaggatcggcaatacgggggaagggtccgatttcaaagccggtatcgattttccccatggcaggcggggcctgctgccttcgctcgcaagtcttctcacgtgttcatttttatgctcagaccatgcaagcaattgtgcaatcatcttttcttgatctaacagcaaaaaaggccttacagcaaattctgaggtcgaatattgcgtaaaggattccaatgcctttattgattcttcccaatgcgctaacccgtactgttccacataatctggaaataaaattccgctgagtcctttaaaatgaggggctgtatcccgtaaaattgtgagcgcttcaacgtattgttttggcaaagtttcgtataaagaaactgtcacgcggcgcatccgctcttttaaagtgagttcaggccagtcctccagccgtaatgtatccaagaatctgtttttgttaaaatcaggataggatgaccttacatgatggatcaactgagatatcagttcttcattatatatttcttttaaatcagccatataaacaccgctttttcgtttattatttatattgtatgggaatgtacgttctggatcaagtgtatagtcctaaaaattaacaactgatcctaccacggatatacaaaagttggttactttttttagttaaaaaaacccttgtcatcggaaaggaaaactgagataataacattgaaagcgcctacacttacctatttcaaatggatacggtcgcatatcatgccgttatatagaggggataagcaacagagagtaagtgttcggagcgcatcattggtcaaacaaggggttcctgatacatgatttttcgtaaatcgaaataacgatattagggagaatggctgcttcgatcgtatcctatcaacaagccatacataaagtctgctgagccaggctttttttgctttaagaaaaggttgttctaaacacagagacagggtcatatcctatacacaagtacagtcatcaaggagggggacatctctgtgtcaaaacaattgcttgccttaaatatagatggagcgctgcttcggtcgaacgggaagattcatcaggcaacgaaagacgcgattgaatatgtaaagaaaaaagggatttacgtcacacttgtgaccaaccgtcattttcgctcagcacagaaaatagcgaaatcgctaaagcttgatgccaagctgatcacccatagcggggcatatatcgctgagaaaattgacgccccgttttttgaaaaaagaatttctgatgatcatacctttaacattgttcaagtgctggagagctatcaatgcaatattcggcttcttcacgaaaagtattccatcggaaacaagaaaaaggtgaattcgaatttattagggaaagcactcattcatccgtctgacccgatcttttatccagtccagttcgttgaatcattaagcgatctcctcatggatgagccggtgagtgcacccgtcatcgaggtgtacacggagcacgacattcagcatgacattacagaaacgattacaaaagccttccctgcggtggacgtgattcgcgtaaacgatgagaaactgaatatcgtcccgaagggtgtctcgaaggaagcgggtttggccctcgtcgcttcagagctgggcctgagtatggatgatgtcgtggccattgggcatcagtatgacgatctgccgatgatcgaacttgccggtcttggggtagcgatggggaatgccgttccggaaattaagagaaaggcagattgggttacaaggtccaatgacgagcaaggtgtcgcttatatgatgaaggaatatttccgaatgcagcagcgaaaaggatttcttgataagttccacatgaaacgtgtgtaaaaaagccgctcgcgccctgacaggtgcggcggcttttttgccggattgattttagcagtttatttctgtacactaaagaaagttttgaatctgataaattaggtgatgaagttgcaaattaaaatagaaggcatacatgatgaccgcctgcatcggcctctgcaaaatattgcaaatttgttttatgaagagtgcgagcttgcgtatggcggagaggagcccgcagattttgtcatttctttagcgttgtcacaaacggatgagcatgtgacggtttctggagaagtgaagggtactggcataaaggaacagcatacaaaattcttttctccagacatgactgaaaaagaagcttttaagcaagtgaaaaacacaatttcttatgtgtatctcaatcttcttcaggcgcatacgggcattacgcagaagtggggaatcctcacaggaatccggcccacaaagctgcttcataaaaaactgcaaagcggaatgtccaaggagcaagcgcatgctgagttgaaaaaagactatttaattcatgatgaaaaaatcatgctaatgcaggaaattgttgaccgtcagctggcggcagtgccggatttgtaccgagtaaaggatgaagtcagcatttatatcggcattccgttctgcccgacaaaatgcgcgtattgcacattccctgcgtacgctatccaaggacaggcgggcagagtcggctcattcctatggggactgcattacgaaatgcagaaaatcggtgaatggctgaaggagcatgatgttaaggttacaaccatttactttggcggcgggacgccgacaagcattacagcggaggagatggatctgctgtatgaagaaatggtccgctccttcccggatgtgaaaaacattcgtgagattacggtggaggccggtcgtcctgacacgattacagaagaaaaactcgccgttttaaacaaatatgacattgatcggatcagcatcaatccgcaatcctacgaaaacgaaacgctaaaggcgatcgggcggcaccatacggttgaagagaccattgagaaatatcatctgtcacgccagcacggcatgaataatattaacatggacttgattattggtttgcctggggaaggcgtgaaggagttcaggcacagtctttcagaaacagaaaaactgatgccggaatcccttaccgttcatactctttcatttaaacgggcgtcagaaatgacgagaaacaagcataagtacaaagttgccggcagggaagaggtttctcaaatgatggaagacgcggtagcctggacgaaagagcatgggtacgtgccttattatttataccgccagaaaaacattcttggaaaccttgaaaacgtcggatactctttgccgggacaagaaagcatctacaacattatgattatggaagaggtgcagacgattattggcatcggctgcggcgctgctagtaaatttattgatcgggatacagggaaaattacgcattttgcgaatccgaaagatccgaaatcgtacaatgagcgcttcgagcactacacggacgaaaaaatcaaatatttagagcagatttttgaaaaaacgacaaagcagcactgattacagtgctgctttttttatccctgtttttttgcgggctgaacctcaggcttccatttaaataccttgttcagcaagcggtaaattcgttttgattcctttgtgacaagcggtcccaaaatcgccagaatgaggacatataatgcggcaaacggctttaatgtggccgacagtccgccggctatcccgagattcgcaacgataatcgaaaattctccccgcgatacgatcgtcagcccgatattcgatgaagccttatgagaaagccctgcgcgtcgtcctgccaccattccggcgataaaatttcccagaatggtcaaaatcactgcacccaacgcaagccaaaccgcttcaccaagcgaaaacggatcgatgctgaggccgaagctgaaaaagaacatcgcaccgaagaagtcgcgaaacggaacaacgaggtgttcaatcctatcggaatgctctgtttctgaaaagaccaaaccgagcagcagcgcgccgattgcttctgctacatgaatcgtctctgaaaaaccggcgataaaaaagagtgctgcgaaaatgacgataataaacacttcgtttgagcgaatgtccaacagtttgttcaacagcggcgggagttttcttgctgcgataaaaaacagcagcatataaccgaaggcgatcaaaatggacaagagtgcactccctacggatgtcgcatcacctagtataaggccggaaacaacggacagatatacggcaaggaaaatatcttcaaacatgatgatgccgagaatcaattcggtttccgggttggcggttctttttaaatcaacgagcacttttgcgacaatcgcacttgacgagattgtgatgacgcctgcgaggatgaggacttccagaaaggaaaatccggtgataaacccgtaaagcagtccgaggctgaagttaatcaaaatataaatcgtcccgccgaccgcgattgattttcctgatttgattaacttcccgacagagaattcgagtccgagatagaagaggaggaacagtacgcccattcgcccgaaaaactcgatgatttcactgctttgaataaatgttagatcaataatccccattttcggcgcgtgcggtccaacaagcattcccagcacaatcagaaacggaataatcgaaaatttaattttattggcgatcacactggcgattgccacaagcacaagtgcagttccgacttcaaatacaagatggtccatcggggctcacacgccctctccagaaagaaaatcgtgaatcagtttcttcagatgctttctctcacctgagaggacaagggtgtcattttcttcaataatcgaatccgctccgggatttaggagcttttcctggttgtgtttgataatcgcaataacagtgacatcgtaattctggcgaacatcaagctcaccgagtgtgcgtccgatcgatttggcgcctttttcgaccttaaaccattcaataataagatcgctgaaggccatttcgatggactccagagcttgcggtttatagaccatgcccccgagaatagctgcaatttgccttgcttcagaatcatccaatgaaatatttgaaagaagctcatccgggtcccggtcattaaaccggtaaatttcccttcttccgtcatcatgaatgataatcgtcattttttcgtggcttcttgtttcgatttcaaactttttgccgatgcccggcagatcgttttctttaatattcaatgaaaatccctccgaatgtagtgttggcagtatggggtgagttacaaataaaacttgagcaaattatattcggaggtaattagactggtatttgacagggacggccaaagccttttccagcctgtttatcagcggttcgtcaagtggtttgacagagagctgcctgacagactgcgccagcgggctgtactctttgatcagctcagccgggtgcatgctgcccggcgatggcgtttttgccgattgtgtttcctgcggatatgaagacataggcacatagctgtcagtgcttgcttcaaactgggaaggcagaaccacgtccgaagggggaaagtacaccataaataaacttaacagaaaactgatcagcaatttatccatgttcctttcctcccttctcatcaagatatcccttctttttcactatataaaactttatgtttccattcaaacaatatgcatttttcagtatctattgaccttgaaaaataaaaaggtttatttggggatggcggggaatgtataggagaaagaaaaaagtaagcgcatacatggaggtgcttttaatggagtttgttcaatatgcatgtaatggggccgttgcagagattatcctgaatcggcctgatgcccatcacgccctgaatgaacagatgctgtctgaattgaaggaggcagtcgaaatggcggctgcaagcgaggcgctcatcgttctcctgagaggaagcgggaaaggcttttcggccggcggtgatatcaggatgatgacgtcagagcatgaccctgaccaatttaaacggctgatggatacgattgaggctgtcaccctgaatttatatcagatgaagaaagtgacaattgcagccattcatggtgctgctgcgggactgggcctgagtttggcgctttgtgcggacattgtgctcgctgaaaaaaacgccgttctcgcgatgaattttatcggcattgggcttgttccggacggcggaggacattatttgctgaagaaaagaatcggtgaagcaaaagcgaaaaaactgatttggagcggaaaaaaactatctgcctcggaagctgccgatatggggcttcttgatgggacatttgccggagaccctgccgaaggcgcaagacccattatcgaaaccctgttggcctcccctcttttggcgatgatcgaaacgaaaggtatttttcaaagcctccaaattgaagaactgaaaaaagtgctatcccttgagcgcagcgcccaagagagaatgagaaggaccaaggatcaccaagaaggaatccgtgcctttttagaaaaacgggagccgaagtttcaagcgtaacagatcagccggaaagctgatcatctgtgaaacaaaatcagctttccggctgcattgactaaacgatgagtatgactatgaagctctttttcttttaagagggcttcaccatgcgtttttgccgcttcttcatgttctgcctcgaattgctcgtttaccagcgtgttccccgaaggatcaaatacggtaaggaaataatcagccatcaggtttctcctccattttaaggtttatcagtctttcttcatttatattctaaaaaggaaatcaaaatcctttattatgctttatccaaaattagtatataatgggtcagggaaggaggagattcagtgcttacaattgatcacgtaacgaagacatttggagattataaagccgttgacggattggacttagatattccggaacagcaaatgttcggtctattaggcgcaaacggagcgggaaaaacaacaacgtttcgcatgatcctaggattattaagcattacggagggctcaatcagctggaagggccgtcctgtgaattatcatatcagcaacaaaatcggttatttgccggaagagcggggcctttatccgaaaatgaaggtaagggatcagctcgtctatcttgccagattaaaagggatggagaagcgagaggctgtaaaagagctcgggacatggcttgaacgcttcaatattacagattacgagaataagaaggtggaagagctttcgaaggggaatcagcagaaaatccaattcatttcggcagttttgcataagccggagctcctgattcttgatgaaccattcagcggcttggaccctgtcaatgttgagctgctaaaagaggccgtgatctcgctgaaaaacagcggtgtttctattttattttcaagccatcggatggaacatgtggaggagctttgtgagaacctttgcatattgcagaaaggaaaaccggttgtacaaggcaagctgaaggagatcaagcgttctttcggtaaaaagaatgttaccattcactccgatgacgatctgcgctttttgcagtcccatgaaggcattcttcaatggaaggaaacggcagacggcgtcaagctgcagattgccaatgaagacatttctcaagagatttttgcgatgctccaaggaaaagggtttatcagaaagtttgagcttgaagagccgtcactgcatgatatttttatagaaaaggtgggggccgtctatgaataaattttggatcatgctttctcatacatacaaaaataagattatggcaaaatcctttattatttcgactgtcatcacggtgctgcttgttttagttgtaacgaatctggagtcgatcatttctttgtttcaaggtgacgatgcgaaagaaaaaatcgccgttgttgatgaaacaaacgaattatatccggttttttctaagcagctgaaagcggtggatacagacggcgatcttgatgtgaagctgtcgaagcaatcggaggatgaggtcacaaagcaagtcaaagatgaatcactcgatggcatgctcatcatcaaacgagatgaaaaagggaccatttcaggaacatataaagcgttaacgatttctgatgaaagcacgtatcaaacactgcagcaggcgctgacgcaaaccaaaacagctgtcggaacagcggagctcggcgtgtcgcaggaaacgattagcagcctttatgcgcctgttactgtggggcagaaggcgctgaaagaaggggcaaagtctgaggaagagcttggccagacggtagggcttgtttacattatgctgttcgtcatttatttctcggtgattatgtatgccagcatgatagcgatggaggtcgcaaccgaaaaatcttcgcgagttatggaaatcctgatctcaagtatgccgccgatccagcaaatgtttgcaaagctgcttggtatcgggcttgtcgggatcacacagcttgctattattataggagccggctctctgtcgcttaagctgaaccaaaagagcgaaacggcttcatctgtcggcggattccttaatttgaccgacgtatctgcaaccactgtcatctatgctgtcattttctttttgctcggatactttttgtacgcgacacttgccgcgtttctcggcagtgtcgtcagcagaatagaggacgtgcagcaaacgatcacgccgatgacgcttttggttgtcgccggttttatgatcgcgatgttcggtttgaatgcgcctgacgcaggatttattacggtaacttcgtttattccgttctttacgccaatgattatgttcctgcgcgtcggcatgcttgatattccgttctggcaggcggctgtcggaatcggaatcacactgctcaccattgtcatactggccgttatcggcgccagaatttataaaggcggtgtattaatttacggcaattcaagcgcgttcaaagcgatcaaacaagcgctacgtttagcgaaaaactgattggaaaacagcctggggattctcaggctgtttctttattgacagaacgtgcattcgcaagaattcggtgctaaaataagggtacttcatcctggaaaggagcagaatgttgactgatctaacctttattcatgcggcagatcttcatcttgacagcccgttttacgggatatcgcatctgccggagccgatttttgcccggattaaagaaagcacgtttgcaagcgtgagacatatgatagacgccgcagtgagagagcacgttgatttcattttgcttgcgggagatctgtttgatgaagccaatcgaagcttaaaggctcagctctttttgaaaaaacagtttgaaagactcagagagtgcggaatttcggtatacgtcatctttgggaatcacgatcatcttggcggggagtggacgccgattgaatggcctgagaatgtccatattttttcgtccgctgttccagaagaaaaatcgttttttaaagaaggcaggcgcatagcaagcatttacggcttcagctatcaagccagagcattgatggaaaaccaagccgcccgctatcggagatcaactgacgcaccgtttcatatcggcatgctccacggcacgctgtcaggatctgaaggacacgatccgtattgcccgtttacacatgacgacctcgtgaaaagcgggatggattattgggcgcttggccatatacataaacgccaggttctatctgccgagcatccggcagtcatttacccgggaaacacgcaagcacgccatataaaggagacgggagataaaggctattatctcgttcatgtgacaaacggagatatatcttatgaatttcagagagcgcatgatgtcctgtgggaaaaagcggcggttgatgtgacggaggcaaagaatatgacagccctcttccaaatggtggaggacacgttttcgaagctgcggaaaaaggggagccctgtttgtgtaaggcttgttttacaagggacggcgccggaatggctgctggaggcgccaaaaggcaccttggatgagtttcttgaagctcttcaggaacaagaagcggaagaggaacgtttcgtttggcctcttagattggacgatgagacagaaaacgaagcaaacctaacaaaccttgatcctttttttggcggtttatttgaagacattgatcgcagcgatctgtcagacgtgctggaagggcttgagcggcatccagtgtatagaaggcacgcggaccggtttagccaagaggaggtaaaggaaataaaagagcaggcacagataatattgaaaagacagcttaaggtgcttgatacatgaggcggtgacagctttgcgaattatatctttacatatctaccaatacggaaaattttccaatcggacctttgacttttccgcctctcctgtccaagtcatctacggattaaatgaggcaggaaaaacgacgatgatgtcattcattgaaagcatgctgttcggttttccgaaaacgaaaaagtatgaaccgaaaacaggcggtgtctacggcggtgttcttgaagctgaacatcctgagtatggggtgctgaagatcgaacggacgaaagggactgccgaaaaactaagcgtgtacacagaaaagggcgaagtaaagcagggagatgttttaaagcagctgttccagggcacagacaggtcgttgtacaaagccatatattcgttcgacgtattcgggctgcaggaaattcacgcctttaatcgggacaagataggggaatttttgctcttttccagcttgtttggtgctgaagccgtatcaaagcttgattcaaggctgacgaaggaaagcgaaaggctctataaaccaaatgggcgaaaccctcaattgaatcaggagctggaaacgcttaagcagctggcagttaagctaaaacaggctgaagcagaggaagcgggctatcatcagcttctcgaggaaaaacgaacgcttgaagcccgccttgcagccgcggaaaccgaattgaaagagacggcgggacatatccgaatgattgagggagcgattgagcgaaagccgctgctaaatgaaaaagcgacactcgaacaggtgattgcagaatttccggaacacgcaggacaatttcctgctgacggactgcatcagctggaaaaatatgaatcccatcttcacccgaaatcagcacagcttgaggcgcttcgggtgaagatggcggagttggacaaacagaggcaaaagcttatccccgataaagaactattggcgaaagaaacgctgatacaagagctttcggcagcgtttcatatgtaccaatcctggggagaacagctggcagccattcaggcacagctgcgccagacgtctgcgcagacagcggcagggctggaacagctcaataaaacggatgaaaatgagctcctgaatatgaacacctcatatgattatgaatggcagcttcagcaagcggtgcagcaatatgtacaggcaagagacagaaaacggcagcttgacgagacgtttgaacttgcccggcaagagctggaagacgcggaaaaggccgttcgtgccgcttcgtccgcgattcttgaaaacagccaaagaaaagataaagaagcagctcttagagcatatgatgaaacacaggggcagcaccaagagcaagcgaagctcagagaacagctaacgttttttgaaagacagcaggctaaacagaaaaagactgtcattgcagctggtatgttgttcatcgttctcttttctctgctgcagcaatggattcccgccataagtttcggcgctgcacttattgtgtattggcttgtttcaggaaagtcgtcttctcgaaacagccgagagacaagacagcccatgacggatatttcaccagcagaagctgaaatgcttagagaagcgttatgggaggatgaccgcaataagcagcaccttctcacacagcgtgcagcgctccagcaaaaagaggcggcgtatgaaagggtcatccagcagtttgaacagtgggaagccgaaatggcgccgtcctttacacaggttgagcgttttatgaatgagctcggatttaaggaagatccatcatttttgcttgatgcatacagcttaatgaaggatgttaaaaaagaagtgaagaaaaagcatgagctgaccatagaagcaggcaggctgaaaaagcaccggagaacattcgaagaacgcgtcagtatgcttcttcccgtgaatcagagtcaggatatctccatttcggacgcccttcacacattgcggaaaaacattgaacgtgaaaaagaaattgagaagcaaaaaaaggaaattgaaacagatattcattatacaaaggaacagatgcttgaacttgagcaagaaatacagtatttccacgcacagattgaacagttatttgccgcggctgctgcaaaagacagagatgcgttttttgccatagccgccatcagcaggcaattgaaggatacggagaacaagcttcatcacgtaaacgcacagcttcaaggcgggtacccggaggaacttgaactggcggattccaatacgctttctgaattgaaagataagcaatttgttgagaatgaaagaaaagagcggctgactgaggagatcgagcagctccgcagccaaatcgcactgctctcagtcaaacaggaacaattagaggcttcgggaatggtctcagacctcaagcttcaaaccgaaatgcaaaaagaacgtgtgaaagaaacggctaaaaaatgggcctccatacaaatggtcaaacaggtgatcagaaacaaattggagcggcataaaaaaatcgagcttccgcgccttctggagacggcaggagaatttttccgtcctctgactgacggaaactaccaaaccatttatttttccgaaacggatgattcgatcatggttatgcatcgcgatggcactgtctatcatgcggaagagctgtcacaagggacgtgtgaacagctgtatacagcgatccgctttgctttggccgttacgcgccagggtgagtcaaagcttccgttccagcttgacgacagttttgttcattttgatcaggaaaggctgaaacgtgtattacatgttctgtatgatttatctgaaggcggtaggcagattttgtattttacatgccatgagcacgtaaaagatgcatttcatagcagccaaatcatccatttggtgtcataaaagaggttctatagctgaaaatcggtatgtgatatactggtattatgtaagatacggagggagctttaatagaatggctaaagggattatgctacatgaggttggcgaacaggtggaccagtatctattgattaaatcctcgacgaaagggattgcaagcaatggaaaaccgtttctgacgctgatgctgcaagaccagtcaggcgatattgaagcgaagctgtgggatgccaagcaaagtgatgaagtgacctatgcgccgcagacgattgtcaaggtcgtcggcgatgttcaccattatcgcggacgcacccagctgaagctaagaaatatcagaccggtaagcgagcaagaaaacgtcaatattgatgattttttagaaaccgcgccgattccgaaaaatgaaatgatggataccatcactcaatatatatttgaaatgaaaaatccgaatatccagcgaatcacaaggtttttggttaaaaaacacgaagctgagtttatggattatccggcggctacgaaaaaccaccatgagtttgtctcaggtttggcgtatcatgttgtctctatgctgaacctggcgaaagcaatagcagatttatatccttctcttgatcgtgatctgctttacgccggtgttatcctgcatgatcttggaaaagtgaaggagctgtccggccctgtttccacttcatatacggttgaaggcaatttgctcggccatatttccatcatggtgacagagctttcaaaagcggctgaggagcttcaaatcgattctgaagaggtgttaattcttcagcatttgattttgagtcaccacggcaaagcagaatggggcagcccgaaaccgcctatggtgaaagaagcggaaattcttcactatatagacaatctggatgcaaaaatgaatatgatggacagagcgcttgagcgcgtgaagccgggcgagtatactgaacgtgtatttgcactggaaaaccgttccttttataaaccgacatttcataaataacttaaaaaggactgatgctgacatattcagctcagtcctttttgatgcgtctttcccgcacataactcgtctcattcccgcatatggttaagaataaagaatctatgcaaagggggaggagcccgtgttattttttccgtggtgggtgtatctttgtattgtaggcatcattttcagcgcatataaacttgtggcggcagccaaagaggaagaaaaagtagaccaggcttttattgaaaaagaaggacagatttatatggagaggatggaaaaggagcgagaacgccgcagttctcagcagcatgaagaagaaaatcaaaaccattccatcgcataaaaaaagctgtgcggctcaatgagccgcacagctttttttattatttagaattgcttgaagatgaagaagtgctgttgcttgttgaagatgtattaaatgtgtctttcagatctttatcttttacttcgatgtcagccttcttcatgactttttgaacagcttcctgaacagctgcgttgtcatttaatttttgttcaagcacttcagatttcagttcttttttcatatcatcatatttgccgcgttcttctgtctttttaatgatatggtagccgtattgcgttttgacaggatcactgacttcacctgtttttaatttgaatgcagctttgctgaatgtttcgtccatttggccttcttttgcgaaccagccaagatccccgccttttgaagcagagctgtctgttgagtattctttcgcaaggtcttcaaacttctcgccttttttcagctttttctctacttcttcagctgtctttttatcagcaacaaggatgtggcttgcacggattttgccttttaagccttcccagtactctttgatatcggcgtctgttactttgatgttatctttagccgctttttgtgtcagcaattcatattttacttgttctttcaggtaatctttgccatattgcttttcgagggcagtatattgatcgccaagctgcgttttgtattctttcagcttgttgtcaatttctttatccgaaactttatacttcttgtccaatactttttcttgcactagctgtgtcagtacgcttgcgccagctgttttcttcatgtttgtgtaaagctcgccttttgtgacatcgcctgcgtctgtttttgcgataacttctttgtcgccgctgctgcaagcactgagagcgaggatgcttgtagcagtgatagctgctattgcgattttcttcattgttttcaaacactcctaatcattccaaattaaattacctatgcgtatcataacatattgtggctttctgtaaaaagattttaaataaagggcattcgtctagtcaaacttttgctgatgacatacttatatattgatcaagaaaaggaggtatgtaacatgagcggaggatactctaacggattcgcgttgctcgtagtactgttcattttgcttatcatcgtaggtgcagcttacatctactaagcagcccgaggatcgcttgcaacataagcgatcctttattttcactagcgcctaatcgtttcaaacatgaattgcataacatgtaattggtaaataaagcttattacaggaggtgctatttaagatgggtgaagtatttgcaggcggattcgctttattggttgtgttatttattttattgattatcatcggcgcttcttggctgtactaatcaacataaaaaagcatagctgcttaatcagcagctatgctttctttcgtatttacactgtaaaggagatctccacaaacgaagagatcagtaaaattaatatagatacattaataaatcggaataccttatcttgccgctcttcaggaatctctctgacaaggcataatgtattggtgagcctgtttatgaaatataaaataaacacggcagccacgataaaatagaataaaatgatgggagattccccctctctctgaactgtcccatattacattaccaaatatttattaaaaaagatagaatgcaaattgaaaaatcgccaccagcaccagggtttgactacttttcaacaagaatatccaagccgtcagcttcctgatcaataaaagcggttttcggtgcttttatcagcttgagagccagcaggaaatcaggcagacagtagccggcgtgaatgcccgagatcatgcaaaaataatgagcgtgattcggaaatgccagtgctgcgtaaaacaataccggtgtaatcagcaagaacgggctgacgagtgaaatcagcattgttgtttttggtatacgtttccatgtgcgcatgcgcaatatgtaaaactttttttctatttttctttttttgcagatgattggcaggacatggatgactttatgtacaaataaaataacgacgagcaaaccgccgaataaagatacatattcatcgcttaagcttgtgccaggccgcagcagctcaaaagctaaaaaggtagatataaaaaccaaaatcataaaacatacagcagttaatattatgcgaacggcgccataatccttcatgagatttatggtcttccagcaattcatcaaagtcatccttccatacatcttgaatagaatctcaaaataatttactcctcccaagagaaaaaatcaatgcttttttaagaaaaaatatcatccggcaggtatttttttgaaacaagcaaacaaactgcgaaatatggggttagaactttcttctcagtgaattatcagctaaaataagattaaagatagaaagaagtggtgtggatggattcgatggatcatcgcattgagcgattagaatattacatacaattattagtgaaaacagtagatatggacaggtaccccttctatgcgcttctcattgataaagggctgagcaaggaagaaggggaagcggttatgaggatatgcgacgaattgtcggaagagctggcaacacaaaaagcgcaaggatttgtaacctttgataagctccttgcgctttttgccggacagctgaatgaaaaattagatgttcatgaaacaatttttgccctgtatgagcaggggctttatcaagagctgatggaagtctttatcgacatcatgaagcattttgattaactgtttacaggttcgagctcttcagccggttcatccgccgcactgtcctttgcttttttcttcaattttccgtttacgctttcaaagtcattgtcaatattggtgagtgacgtttcgaaaatttccataaaatcatcgccgtagatatggcgtatcatacacatcatttctgccacttcaggaaattttccgaataaatgatataaaggctgtgaccctttaaaaacagcgttgcgtgtcggatcaaattcctcaagcaagctccagaatacctcggtaccttcctcagtcaattggacatatgtgttccgtttatcattcagccgtttggagaaccttaaatatccccgttcttccagcttttttgaaaagttgaatgcggttgatacgtgcatgaccccgaatttcgcgatttcagaaatggaagctccattcaattgatacgcaatccataaaatatgatgctcattaatattcaggtcatacggtttgagccattgctgccaatccttctcgatcgatttccaaagagccttgctaagctgagccattttctgggtgaaaaccagagcttctttcacatcatagggcggttccactcgattcattacgtcacctgcttctctttttctttttctctattatgccaataaaataaagattaataaagatgaaaatgtaagaattttttaataaattcacaaaccattgcgacgaaagggtttttcggccaaaaaaaatacgggtccaattttggcccgcatttttttcttttgaataggatattagttttgtaaggttttctccagctgtctgattttctcttcgatatcggcaatttctttttgcagatcctgctggtgaggcttgatctcttcctgccattttttaattgatgtttggagctcgccgcccacgtctttaataacatccgtgctttcttttgccgctttgatcagctggtcttttaatgcaagcccgtctgactttaagcgtttgattgtttcttcaaaagaatcataattggttttcattttttcacgcagctgctttcctgaggaaggtgcagtaagaagaaccgctgctcctccgatgatgccgcctacgaatagtcctgttaatagagaacgtccgctcgccattacaatcaccccgtctttttcttcaaaataggattcattcagcatttttcatttttgttgaaagcctgaacttctatacatagcttgctttattttagcatattttttaagtgaaaaggagggagaaggttgtctgtctttttgattgtattatcctgcatcacccttgccttcgcttcaggcgctgtttactatatcaaacttctcagccaggctgcttcttatccgcccaagagggttatccggcagaaagcgcttgtttgttcaaccggaaccgcctttacactatgtcttatctttttcacaaaactcctcgcttaaaacatgctgacatgctgcgggcgctctgttcaaaaaaacctctcccggaagcggaagaggttttgtgtgacaattatttagcagcttccataaagcttgaacgccttaaaatggtttgcacaatcggataaataatgatcattgagattgtattcagcacagcggccggcagaacaacagccgcgaacaatgcggcgaaaccgcccggtaaaccgacgatcaataaagctgacgatagaaacacaattcctgataagatggtcccgatcactgtcagcacagcggctgcacctgttttccggctctttctgaacaagagaaacagggagaagaacagaaacgctgatacgggtttatcaatgatgttagggatctgtccggctggaaacgcggttgtaagcgcggaaatgattccggtcacgatcccgatgacgagtacattttgcacccgcgggaacagcagaatgcccatgaacatcatgatcagcatcatatctggtttcatgccgcctaaaaagggcggaataatggaatgaagcgctgcgccgattgcggcaaacagagccataatgactaactcttttgttttcataactatgctctcctctgctaagctttttgccctccaataatatgctcatcatttattgcgaaggctttacagaatgtgttatgcaaacagtataccaaacggacggtttgcatagccagactttttactcattttcctgctggaatttcttcatgaacgcagctaatttttcacagtcttcgagagagaccgcgttataaatagaagcgcggcagcctcccaccgaacggtgtccgccaaggccgatcatcttcgcatcttttgctttctgaacgaatgttttcgttaattcgtcatcccgaagcgtgaatgtgacattcatgcgtgagcggctgtcttttctggcatgtcctttatagaagccgttgctttcatcaatacagctgtagagaacctgcgctttttgttcattgcgctgttcaacagcttccacaccgccgttttccttgagccattccagaacgaggctcagcatataaatcgcaaatgtcggcggagtgttgtagagtgaatccgctttgacatgcgtggaatatttcaagatttttgggacgttcgcattttcattttgcagccagctttttttcatgatgactacagtcacgccggaagggccgaggttcttttgggcgcctccgtagatcacatcaaatttggacacatcgatttttctgcttaaaatatcgctggacatgtcggctacgagcggaattggagaattcggaaactcctgccactgagtgccgaaaattgtattgttggatgtgatatgtaaatatgcgccgtcttttacatccgtaaggtcaacctctggaatataactgtaattgtctgtttcacttgtagcggtgatagacgtgttcccgaacagtttcgtttctgccagtgctttttcagaccaagcgccggtcatcacaaaatgtgcggttttttcaggtgttaaaaagttcatcggaagcattgagaattgaaggcttgccccgccttgaagaaacaagatatcgtaatcttccggaatgcccatcagttcgattaagaggcttttcgctttttggtgcaccgcttcatactctttgctgcggtgggaaagctccataacagacatgccggattcgttaaaatcaataaattctttctgtgctttttgcagaacttccagtggcagcgctgcaggacctgcgttaaaattcgttgtacgttccattatgatctctccctgttttccacgttaatgtataaaataatacaattatcctatcacaaaaattcagttttttgataaaaaattagaattatcaaaagaaattgacggatgtttgcgaaatgttcacaaaataaaataacctcatcttatgatgaggccaggcgttttgcgatagaggaagagatgttctgcagatcctccggtttataatcatcagcatgcgttttccaaaccgctccgaatccatctccttttccgtagcgagggataatatgcatatggtagtggaacacagattgtccagctttttcgccgttattgttcagcgtatttaagccgatcggttcaaattcatcccggatagcgcgggcgatttttggaacagcatggaaatattgttttgctaattcatctgtaaattcatatacattctcaatatgtgttttcggaatgacaagcgtatggccttttgtcacttggctgatatcaagaaaggcaagtacatgttcatcttcatacaccttcgctgatggaatgtcgccggcaataattttacaaaagatacaattctctgcacaatgcatgagggttcctccttatgaaattgtttagtatgtatacattcatcgtaccacagaaatgcagaaaatagaaaacaggatgaacggcgagcgttcaccctgaatgcagaggaagagcttatatgaagaaaatgtgttatgcctttggtaagcacctcatttgtcaataaaatgaagacttgtttaatgcctaacgattcctgcgataaacacctcatttgacaatttgcttcatacatgaagaattcatcaattcagtgaagagaaatggtttgagcattggacatgtttattttctatccaactgtttctaagacgtctttgacaaacacctcatttttcagttgatatgcttttcctctacaacttttatgatgtccagaaccctgtctctttatgacagcaaattcatcatttgttaaaagggaattgtttcaaatcaggccttgtttttggtactatgaagaaaaacactataaggggagaaactatgtctctgctatcggtaaaagacttgaccggcggatatacaaggaatccggttttaaaaaacgtatcattcacccttgaaccgaatcaaattgtcggcttaatcgggctgaatggtgctggtaaaagtacaacaatcagacacatcatcgggctgatggacccgcataaaggttcaatcgaattaaacggtaaaacgtttgctgaggatccggaaggctaccgttcacaatttacctatatacctgaaacacctgttttatacgaagaattgacgctgatggagcatcttgaactaacagccatggcatatggactgtcaaaagaaacgatggagaaaaggctgcctccgctactaaaggaattccgaatggaaaagaggctgaagtggttcccggcccatttttctaaaggaatgaagcagaaggttatgattatgtgcgcatttttggcagagcctgcgctctacattattgatgagccttttctagggcttgatccgcttgccattaacgcgctgcttgaacggatgaatgaagcgaaaaaaggcggggcgagcgtgctgatgtcaacacacattttggcaacggcagaacgctattgcgattcgtttattattttacataacggcgaggtgcgggcgcgcggcacgctgtcagagctcagagagcagtttggaatgaaggacgcggcgctggacgatttgtatcttgagcttacaaaggaagacgctggccatgaataatatgcttgatatttggcagtcgcggctgcaggagcatatcaaagaaacaagaacatacatgaaatatatgctcaacgatcacctcgtcattgttttgattttttttctagcgggcgctgcaagctggtacagcaaatggatacgggacattcccgctcactttccgtccttttgggtgatggccgtgctgttttcgctcgtattgacaagctcttatgtgcgaacgcttttgaaggaggctgaccttgttttcttattgcctcttgaagcaaaaatggagccttacttgaagcaggcgtttgtctacagctatgtgtctcagctgtttccgctgattgcgctgagcatcgttgcgatgccgctttatttcgcagtcactccgggagcttcgctcgtatcgtatgccgcggtctttgtccaactgttgctgctgaaagcgtggaatcaggtaatggaatggcgaacgactttccaaaacgaccgcagcatgaaacggatggacgtcatcattcgctttgcggcgaatacactcgttctttattttgttttccaatctgtttatatgtatgcgcttctcgtctatgtcattatggctgttctttatctgtatatgtcttccgcagcaaaacggaaaacatttaaatgggagagccatattgagtccgaattgagacgaaagcagcgtttctatcggattgccaacctgtttactgatgtgccgcatttgcgaaagcaagccaaacgcagagcttatctcgactttttgctgcggcttgtgccgtttgaacagcgcaaaacatttgcctatatgttcacccgcgcctttttgcgttcgagcgattatttgggcattcttgtcagattaacgatcgttttcgcgctgatcattatgtatgtctcagccagcccgctgattgccgcggttttgactgtgtttgccattttcattacgggcattcagcttctgccgctcttcggtcactttgaccatctggcgcttcaagagctgtaccctgtgcaaaaagaaacaaagctgaaaagctatttctctctattaaaaactgcacttagtattcaagcgctgctgatgtctgttgcatctgcctatgcagccggcttgaccggttttctgtacgcgctgatcggttctgccgttctgatttttgttgttttgcctgcttatatgacgaccaggctgaaaaagcacggaaagctgtgaactgaaaagaggtaatcaaatgacagataatcagctgctgatgcaggaagctttggaatggaaaatgcattttttgcgaaaggattccatgtttgaacgcttttcgaagcgtgtccagacgaaggtgaatgaacggattcctgaaaaaatccatacggtcgtcaccgagagtgtgaaaaaaatggtagaagcgacaatggccggctctaatatcatcacctataaaaaggatacaagtgcactgtcgctcagtgaaaaaaacgaattggcgaaaaaaacgattgtttcttatcaaaaagtggcagctgctgagggagtcggcaccggagcgggcggcatttttttaagcattgctgattttccgctgctgctttcaattaagatgaagtgtttatttaccttgtcttccatttacggctttgatgtcaaggatgcacaagaaaggatatttttgctgctcgtgtttcagcttgcgttttcgagtgatgatggccgtaagtcgcttttttctgtcatcgaaaattgggagacggagaaaaagagcatcgactggagagtgttccagcaggaatatcgcgattatatcgacgtcgtgaagctttttcagcttttgccgggcgtaggagcggcagtcggcggaattgccaattataagctgcttgctcagcttggagaaacggcaagacatgtttttcatctgaggatattaaaggaaacagccggagaataaacactccggctgtttttttatagctgatgataggtgatcgcagcgccggcaaggaccttggccgctgtcagcatggctttttcgttgatatcaaatttcggatggtggtgggaatagactcgctctggctgttcgggagcggcgcctgtaaagaaaaaagtgcccttcacgttttgtaagtaataagcaaaatcctcgccgcccatttgtggttcaccgtcaatgacctgctgaacgccctcggtattctttgcggtgctcaccaagtggttcgtttctgcaggatggttcacaaccgctggataaccctgttcataggtgtactcataggacgcgccgtgcatgctgcatattccttttacaaccgcttcaatttctttctccagaatgtcccggacattttcatcaaaagaacgcgctgtgccgatgagtactgcttggtctgcgatgacattaaacggattgtcggcgatgaaggagcctgtcgaaatgacggcggattgaatcggattgactttgcggctgacaatgtgctgcaaagaggaaacgatttgcgaaccgattaggacggcgtctttagtatcatgcggatgagcgccgtggccgccctttccgaagactttaatcgtaaatcggtctgccgccgccattacggcgccggggcggcagagaatagttccgagcggctcagttgcccaaagatgagtgccgaatatcacatccgtgttttcgagacatccgtcatcaatcattggctttgcgcctccaggataatattcttctgcatgctggtggatcatcacaaatgttcccttcagttcatgtctgttttggtgaaggaccttggccactgcgagaagagctgcggtgtggccgtcgtggccgcatgcatgcatgacaccaggcactttggaggcgtaagggacatctttttcatcttgaatggggagagcgtcaaagtcggccctcaaagcgactgtagggccgggttcgcttccttctatatttgctaaaacccctctaccgccaacgtttgtgcggattgggactcctaacgattcataataggaagcaataaatgcggcggttttttcttcttgaaatgagagctcaggatacatatgaaaatggcgcctgatctcaaccatttcttcaaaacagccgtcgagctgtttgtttatctctttctgcagtgtggatatggacaaagccgcttcccccttttctatgcttttccatgattgtatagaaaaagtctgaatatttcaactcatgctgttttaaagcatcatcacagctgcgagggttgtcaccaaaaggccaatcgcgacgggaatgaagttttttctggcaagctcaaaaggatcaactttgcaaatggccgcggcgggaatcaaagcccatgggaccagtgttcctccgcccacccagatggcagagatttgtccgagcgcggtcagaatagcgggatcggcatggagagcggacgaaaagagctttgcgatggagccggcgagagaaatgccagaaaatcctgagccgtcaaggcctgttatggctccagcggcagttaatgcagtggcggcaagctcctttgacataggcatcatatgggataaagcaatgccaagatcgttgacaatgccgtgggaacctttagggagtgaagtgcccagtatgctttcatagcctgagtcgccaagataaaagaaagcggcaatcgggatgacggggccgaaaaccttaaaaccgaacttaaatccgtcaataaaatagccggtgattttttcaagccctttatgcttatacacgaaaaaatgaacggtaaagaggatacaaattgcagacccgccaattaacgcggttgcatcatttccttgtaggttaaacaagagcatgcaggcgatatctgcaagaaaggcaagcggaatcaaaaaagccagtatggaccgcaggcgttttggcaagtacagcgagttgtcttgttcgccggaaagaacgggggaaaaagaagtgggatgctcctgttttttgcgttcgcgctgaatcatgataaaggcagcagttgttgttgtcacacccataatcagcacaagcggaatactggccgagacgacatcaccgactggaatgcctgctgcatccgcagtcagctttggcgccgcctgaatgacaaagtctcctgacagggcaaaaccgtgtccgaataagttcatggccatggccgcggcaagaggcgtcaaaccggcacgtgcggctgcggggagcaggacggcgccgatcaaagcgacacccggagaaggccagaagaatagagaaatggcgaacatcaggcctccaatcagccaataggcagtcacaggccctctcacaaggcttgcaaagggagaaatcatcgcttcatttatccctgtttttgttaacaaatcactcattgaaacgataaagcaaatgatgaaaatcgtgggcagcagttcgccggccgcatagataaagctgtggaataaactgctgacagaagctgaaagtgaatggctggcccatagcgatatgataaaaatgccgaatagagaaataaatgtcgtgtcttttctcagcagcataaataggataattgcaccgataaaaaacacatacagaacatggacaggcaaaatcccgacttccatcatcgatcactccttccgcttacagattattcataggcgggcggaaggtgccgggacagaggggagggttatgatggaagatgaacattgatctgtttcagctgctcaatcagatgatgccttaatcctctattcgctttttgcagatgttttgggaagcattcaggagaaaaaatgacgcacccttcagcaagccagttttttctataggcgatgatgctttccgatggctctatatgagttatcctcgtgctgcatctcgtactcatcaaatccgaactgaaaaccgcagcacgggcagatttcatgagaatgattgccttcatgatcatatggcggttcagccaatcccttaaacccgcagactgggcaagtatgcttcattttgctttcctcccaataaaataagctgccggacatgccggcagctattcgacagcgaaatatgtggtgacataggaaggccgggagaagatcgacgttgtgtcaattccggcagatgtatcgcgttttttgtgggcttctttgtaagaaccggactgctgccagtcttgaaaggcgctttccgtttcccacaaggtcagaatgacataggtgtcactgtcaagcggacggagcactcgaattgcttcaaagccaggctcgttttcgacttttcccgctctgtttttaaatctgttttcaaacagcggacgcccttcctgagtaacggcaatattgttcaatactgcaaaaccgggatgtttgatctctccgacttggtcaatgacttcataagcgtgtggtgcctggaaaacggtatctccgtttgtttcatgaattaaaatggcgttttcctgcccctgcatcaaaaggatattttctgagggatgcttctgtacgatcgtttttaaaaaatcggctgtcccatatgtaatataaaccttcatatcagccacctcctgcttgctagtatatcaaaacaatggtataagtttctattggcgagtgcttcgaacataattccaaacaatttttcccatactacctttagaaaggcgaggtgagttcatgtttaagataaagaaaaagaaactttttatacctatcattattttagtgttaactgcttttctcgctttaataggatatatttcaattatttttctcggccattatgtcatagatgaaaaaaagcttattcttcatgcttcttcaaaaattgttgatcaaaacggagatgaggttgcaagcctgtatacagaaaatcgcgagccggtctcgatcaatgagattcctaagcaggtcagagaagcgtttatcgctgttgaggataaaaggttctatgagcatcacggcattgatgcaaaatccgtcggaagggcagtgtaccgcgatatattagcaggcggaaaggtggaaggcggaagcacgatcacccagcagcttgccaaaaatatttttctgacacatgacaaaacatttctaagaaaaacaaaagaagtgatcattgcgattaatcttgaacgggattacagcaaggacaagctgcttgaaatgtatttaaaccagctttacttcggacacggggtttacggcatacaagcggcgtcccactattattttaataaagaagtaaaagatttgactgtatctgaaggcgctgttttggccgctattccgaaggcgccttctacgtactctccaattttgcaccctgataaaaataaggagcggcgtgatacaattctaggtatgatgaatgaccaaggctatatcagtgcgaaagaggctgtcaccgcacagggccggacgcttggactgcatgtgaagaaacagtcggaaacaccttggtttgacagctacattgaccttgtgatcaaagaggcggaagacaagtattccatttccggagagcagcttcttcaaggcggatacacgatcaaggtgccgctcgattcgaagctgcagaagacggcttaccaggtgatgaaagagggaagctattatcccggaacagatcagaatgccgagggaagcgcggtctttattaataacaagacaggcggtgtagaagcggccatcggcggaagggattacacatccaaaggatataaccgtgtcacagctgtccgccagccgggttccacatttaagccgcttgctgtatacggaccggcgatgcaggaaaagaaatttaagccatattctctattgaaggatgagttgcagtcctacggagattatacgccgaaaaactacgacagccggtatgagggcgaagtcactatgtctgacgccattacgtacagcaaaaacgcgccggctgtctggacgctgaatgagatcggcgtcgaaacagggaaatcttatttgaaagcaaacggcattgatatccctgatgaaggccttgctcttgctctaggcggcttggaaaaaggcgtttcaccgctccagcttgccggcgcgtttcatacatttgccgcgaatggaacgtatactgaacccttctttatctcgagcataatagatgaagacggagaaacaatagccgatcataaagaagaaggaaagcgggtattcagcaagcagacgtcttggaatatgacgagaatgctgcagcaggtagtcaaaaagggaacggccacgtccggcacctatcacggcgacctggcgggaaaaacaggttcaacatcttatacaggcgtctccggcgcgacaaaggacgcctggtttgcaggctatacgccgaaaataaccggggcagtctggatgggctatgacaaaacggatcaaaaccattatttgaaagccgggagctcatacccgacgcggctgtttaaggatattttgacacaggcaggagaaaccggtcatgtgttcacaaagcctaaaaacgttaaagaactggaaagcccgattgagctgaagccggtcaaaacactcacagccgattacacatttaaagcagcggggctctttactattgaattaaagtgggacgctcaagaggatgatcgggccgtatacagaatttatgtaaacaaggacggcgaggagacgcttcttgattcggttgaagggaagggaagctatgaaattccttatgccaacttattttcgggcgcgtcttataaaattgtgccttataatacacagacaaaaagagaaggggaaggaaccgattacgttcagccaaaattgttttcctcttaatggaattcggcgattttttgaactttgagctacatttctataccatttgcctaaaacaaggtatagtgtaataagtcaagaaatacgaacgtatggttgccgtatgaaaggtggaaatcagatgagtaaacgagaaacgtttaacgagacgtttttaaaagctgcgcggggagaaaaagcggatcacacgcctgtgtggtatatgaggcaagcagggcgctcacagccggaataccgcaagctgaaggaaaagtacggattgtttgagatcacacatcagcccgaactttgtgcgtatgtcacaagactgccggttgagcaatacggagtcgatgctgcaatcctttataaagatatcatgacgccgctgccgtcaatcggtgtggatgttgaaatcaaaaacgggatcggtcctgtgattgatcagccaatccggtctctggcggacattgaaaaactcggccagattgatccggaacaggacgtgccgtacgtgcttgagacgattaaactgcttgtcaatgagcagctgaacgtcccgctcatcggtttctcaggtgcgccttttacgcttgcaagctatatgatcgaaggcggcccgtcgaaaaactacaataaaacaaaagccttcatgtacagcatgccagatgcatggaatctgctgatgtccaagcttgccgacatgatcatcgtgtacgtgaaagcgcagattgaggcaggcgcaaaagcgattcaaatctttgattcgtgggtcggcgcattgaatcaggcagattacagaacatacatcaaacccgtgatgaaccggatcttttcagagctcgcaaaggagaatgtgccgctgatcatgtttggcgttggcgcaagccatcttgcaggtgattggcatgaccttcctctcgatgttgtcgggcttgactggagactcggcattgatgaagccagatcaaaaggaattactaaaacagtgcagggcaacctggacccgtccattttgcttgcgccatgggaagtcattgagcagaaaacgaaggaaatacttgatcagggtatggagtcagacggcttcattttcaatcttggccatggggtatttcctgatgtcagtcccgaggttttgaaaaaactgacagcatttgtccatgaatattcacaaaacaaaaaaatgggtcaatattcctaagcatatcttttggtatcttaatgatatcctgtcaaaatgtttgtatcagatcattaaagagggtgtaaacagtgagtagaaagaaaatggggcttctcgtgatggcgtacggcacgccttataaggaagaagatattgaacgttattatacacatatcagaagaggcagaaagcctgaacctgaaatgcttcaagatttgaaagacagatacgaagcgattggcggcatttcaccgcttgcccaaatcacagaacagcaggcgcataatctggaacagcacttgaatgaaattcaggatgagattacgtttaaagcgtatatcggactgaagcatatcgagccgtttattgaagacgccgtagcagagatgcataaggatggcattacagaagcagtcagcatcgtgctggcgccgcatttctccacgttcagcgttcagtcctacaacaaacgcgccaaagaagaggctgaaaaactcggcggcttaacgattacgtcagttgaaagctggtacgatgaaccgaagttcgtgacatattgggttgaccgagtgaaggaaacatatgcgtcaatgcctgaggatgaaagagaaaacgcaatgctcatcgtatccgcacacagcctgccggaaaaaatcaaagaatttggagacccgtacccggaccagcttcatgaatcggcgaaattaattgctgaaggcgcaggcgtttccgaatatgctgtcggctggcaaagtgaagggaacacgcctgatccttggctcggacccgatgttcaggatttaacacgtgatttattcgaacaaaaaggctatcaagcatttgtatatgttcctgttgggtttgtcgcggatcacttagaagtgctttatgataatgattatgaatgcaaagtggttactgacgatatcggcgcaagctattaccggccggaaatgccaaatgccaagcctgaatttattgatgctttggcaacagtcgtattaaaaaaattaggacgttaaagaaggcgatgaacatgagtgacggcaaaaaacatgtagtcatcatcggcggcggcattaccggtttagccgccgccttctatatggaaaaagaaatcaaagaaaagaatctgccgcttgagctgacacttgttgaggcaagtccgagagtcggcgggaaaatccagactgtcaagaaagacggctatatcatcgaaagagggccagactcatttctggaacgaaagaaaagcgccccgcagcttgttaaagacttaggtcttgagcatttgcttgtcaacaatgcgaccgggcaatcctatgtgcttgtaaaccgcaccctgcatccaatgccgaagggcgctgtaatggggataccgacaaaaattgcgccgtttgtttctacgggtctgttttccttgtccgggaaggcgagagctgctatggatttcatcctgcctgcaagcaaaacaaaggatgatcagtcattgggagaattcttccgcagacgtgtcggagatgaagtggtcgagaacttaatcgagccgctactatcagggatctacgcaggcgacattgacaagctcagcctgatgtcgacatttccgcaattttatcagacggaacaaaagcatagaagcctgattctcggcatgaaaaaaacaaggcctcaaggctcaggccagcagctgacggcaaaaaaacaagggcagttccaaactctgtcaaccggtttgcagacccttgtagaagagatcgaaaagcagttaaagctgacgaaggtgtataaaggcacaaaagtgaccaaacttagccatagcggctcttgctattcgctcgaactggataacggcgtcacacttgatgctgattcagtaattgtgactgctccgcataaagcggctgcgggaatgctttctgagcttcctgccatttctcatttgaaaaatatgcactccacatccgtggcaaacgtcgctttaggtttccctgaaggctccgtccaaatggagcatgagggcacgggttttgtcatttcaagaaacagtgactttgcgatcacagcctgtacgtggacgaataaaaaatggccgcacgcagcgccggaaggcaaaacgctgcttcgggcatatgtcggaaaagccggagacgaatccattgtcgatctatcagataatgacattatcaacattgtgttagaagacttaaagaaagtcatgaacataaacggcgagccggaaatgacatgtgtaacccgatggcatgaaagcatgccgcagtaccatgtcggccataagcagcgtatcaaggagctgcgtgaagcacttgcatctgcgtatccgggtgtttatatgacaggcgcttctttcgaaggtgtcggcattcccgactgcattgatcaaggaaaagctgccgtgtctgacgcgcttacctatttattcagctaaaacctccgctttatcgcggaggtttttttgatgtgcaatggcaatattgtgtaaaaaatgattgaattgaacagcaggttatgatacatttgcatatgtacttaatgactaaaatgttcaaacggtcagtttcgaggtgaatacaatgtcaatagatcgaaaaaagctcattttggaggcggctacaaagtctttcacgcagttcgggtataaagcgacgacaatggatcttgtcgcaaaacttgcgaacgtggggaagggaaccatttatacttttttcaaaaacaaagaagagctgtttgacgagattttcactactttattaaaggaaatgaagcaaaaagcggatgaagcgatggagccgagccttccgttccatgaaaatgtgcacagagcgctgtttgccattctggagttcaggaaaacacatcagctgacgattaaaattttccaagagaatgccgagattggtacaatggcagttcaggaagtgatccagaaaatggagcgatccatcctgtcttatatcaaaagcaagattgaagacgggatcaaaagcggcgcaatcaagccgtgcgaccctgagctgacagcctttgtgatgctgaagctttatatcgcgctcatttttgactgggaaaaacaacaccccccgcttgataaagagacaattgcgggactgcttgaattgtatgttgtcaaaggattgtcagcgaactagataatcctttctctttgcaagaaaatgaccattttttatgatgagtcagttttagaatggaggcatcaggatgaacacaatacgaagtcagtggaaagacatcgtaacaagtaaaaaattattgattcccatcatcgccattttgtttgtcccgcttatttacagcggcgtattcttaaaggcttattgggacccgtacggcacagttgaccagctgcctgtcgttgtcgtcaaccaagacaagggagcaacgtatgaaggagaaaaacttcaaatcggtgatgatctggtcaaagaattaaaggataataacaactttgattggcatttttccaatgatctcgaccaatcgttaaaggacttattgaatcaaaaatattatttagttgtcgagattcctgaggatttttctaagaatgccagcactgtattagacaaaaatccgaaaaaattggatctgaaataccatacaaatgcaggttctaactatgtaggggcaacgatcggcgaaaaagcgattgataaactgaaagcctctgtttcaaaagaagtgaccgagcaatatacgaaagttatttttgataactttaaagatatcgcaaaaggtttgagcgacgcgagcagcggcgcgaaaaaaattgatgacggcacaaaggatgcgaaaaacggaagcgcccagctgaaagaaaatctggcgaagctgaaggaaagcaccgctaccatcagtgacaaaacagcgcagcttgcagatggagcggctcaggtgacgagcggcatccaatcacttgacagctcgctcggtaaattccaggacagcagcaaccagatttatgataaatctagtcagcttgcagcaggatcaggcgagctgacaagcaagatgaatgaacttcttgccggacttcaaaatgtgcagaagggtacgcctaatcttactaacgggttggatcagctcaacagtaaagtccaagaaggttctgagaaagcggcaaaagcggaaaagatcattaatgcgctcgatttaacgaagcttgaaactgctgtaaacaatctggaaaagtcagaaactgcgatgaaggaattcaaaaaacagctgactgactttgaaaacagtttgaaaaaccgtgatcaggcatttaaaaatgtcatcaattcgagtgacttcttaacagcggagcaaaaaagccagctgattaattctgttgagaaaaagcttccgcaagttgatgcgcctgattttgatcaaatattaagccagctacctacagctgatcagctgcctgacatcgcaacgataaaaagctctcttgaagacgtgaaagcgcaggtggcgcaggtgaaagccatgccggaagctacatctaagctttataacggcgcaaaaacaatccaagatgcgattgacagattaactgagggagctgataagatatacaacggttctcagaagctgacagatggccaaactaaactgacagcgggcatcggtgaatataataagcagttcgcaaaagcaaaagcgggctcagagcaattggtgacaggaagcagccaagtatccggcggattgtttaagctgttagacgggtctaaacaggtccaaagcggatcatcaaaacttgcagacggatctgcatcacttgatacaggtttaggcaagctattggacggcacaggagagctgtctagtaagctgaaggatgcggctgaccaaacaggagatatcgatgctgatgatcaaacatacggcatgtttgcggatccggttaaaaccaaagatgatgccattcattccgttcctaactatggaacagggctgacaccttatatcctgtcaatgggcttgtatgtcggcggcatcatgctgacggttgtcttcccgctgaaggaagcgtcaggacgtccgagaaacggttttgagtggttcttcagcaaattcaatgtcatgatgcttgtaggaatcattcaatcattgattgtggcgacggttcttctattgggaattggtcttgaggtagagagcacgtggagattttacgtgtttacgatcattacgagtctcgctttcctggcgataattcaatttttggctacaacgatgggcaacccggggcgatttatcgcagtcattattttagtgctgcagctgggagcgagcggaggaaccttcccgctggaattgcttccgaatttctatcaggtcatccacggcgcattgccgatgacctacagcattaacggattcagagcagtcatttcaaacggtgactttggctacatgtggcagatggccggcgtcttaatcggcattgccctcgtcatgattgcactaagcattacttactttacaatgttaagccggaaggaagaaacatcagaagaacagccggcttcataaagaaaaagaacttgtttccttggaaacaagttctttttttgttacatcccccatttaataagcaatcctgtataggttaatccgccgccaaacccgaaaagcaaaacgatttgatcttttttcagcttcccggctttcactgcgagatcgagcgccaaaacaattgaaaccgaagacgtgtttccgtagtgctcaacactagtgagcgttttttcaatcgggaacggtgttttttcacaaattgactcgatcatgcgcaagttggcgctgtgaggaacaaaccaatcgagatcatcggagctgagtcctgctttatgtaaaagccgttcaaattcgccagggacggttcttgcggcccatttatatacctcgcgtccgttttgcaccatttttccggaaccgacaagctgcacaccgtttatttcatttcgcagtccggcacgatacaaaatatcgccgccgttcccgcttgttccttgtacagacgcaagaaatcccggcgtctcttcatctcgttctactaacagcgcacccgcggcatcgccgaacagtacgcatgtcgttcgatcggtataatcggttacctttgataacgtctctccggcgatgacgagaattttttgatgaaggccagatgtgatcaatccatttgccaaatggaggccgtatgtcagcccggcgcatgtcgcattaatatccagcgcgccggtgctttcccagccgaaatattcctgtacgcggcatgccgtactcggaaaggcgtaatcggatgtggttgtggcaacgaggatcatatcgacatcatcaagcgttcctttataacggctcttgagattcttcaccgcttctatgcataaatcagaggtaaattgatgttcatccgcaatccggcgttctctcattcctgtgcgctgaacgatccattcatcagaggtatcaacgatcttttctaaatctgcattggttaaacgtctgctcggcgcataggtgccgatagctgtaatttttgcttttgacatatgaatcactccttatggtcagattataacactagatattagtatctggtactaaaaagaaggtttttttacaaaaaaagagaagtgtagataggaatctatgaaaaagaaaaaggaggctgaaaaatggtcagtcaagaagcagtagtctttttggcattatccggggctattgcgtttctgttgccaatcgggctgattgtatggtttaagcgaaagtatggtgcctcgcttaaagtgttttttattggcgctctcacgttttttgtcttcgctcagctgctggaaggcggcgttcatgtttatgtactgcaagtgaatgaaatgacgaaagaagcgatgcagcatccattatggtatggcatttacggctgcttgatggccggcatttttgaggagtgcggaaggtatttgatgatgcgattttttatgaagcgccatcatacttgggcagatggtctggctttcggggcaggccatggcgggcttgaagccatcctgattacaggcttgtcctctatctcacttattgtatacgcatttgcaatcaatagcgggacgtttgaacagcttttggtcaatggcgacgtcaaacaggcgcttttgccgatacaggagcagctgctgcatactccttcgtatgaatggatgctgggcggaatagaaagaatcagtgccattgccgtccagattggtctgtctctgcttgttttgtacgcggttaaaaaccgccggccgctgtttttgctgtattctattcttttacatgcactgtttaatgtcccggcggttttatatcaaagaggaatcatagagcatgctgcagctgttgaaatcattgttgctcttatagcggctttatcagtttattggattgtaaaagcaaaaagggtgtttcaataaaaggtccaagcagcagcaatgcccgcttggaaaaatgtgaatggaaatattcattaagcatgggtcatcagaatatttctgattcagtctttagcaatgacagcaagaatgtctgtgttttttacaagagaaacaatggtgtttctttttcttcttctcgcaagggtcatggcattctttctttttcttgcaatggtcgtggaaatctttatcgaaccactcgtcaaagaaccaaaaatcatcgaaccaatcgtgacaacgacatttctgttcatgtgaatgacgacagcacatagaaatccctcctcttcccatgctctctacagcatatgagagattgataggaaaagattggacgggtccctcgggaaaagagtatattttaagtagaaaataaaaggaggaatgccctatgacgtccgtacgtaaaacgatggagctcattaaagaacttgtatcgatcccaagcccgacaggaaatacatatgaggtgatcaattatattgaaagccttttaaaagaatggaaggtagaaacggttcggaaccacaagggcggcttaattgcaacgcttccaggacgcgacacatcccggcatcgcatgctgacagcgcacgttgacaccctcggcgctatggtgaaggaaattaaagcggacggccggctgaaaatcgacttaatcggcgggttccgctacaactcgattgagggggagtattgccaaattgaaaccgcctcgggaaaaatgtacacaggcacaatcttaatgcatcaaacgtctgtgcacgtatacaaagacgcgggaaaggctgagcggaatcaagagaatatggagatccgcctagatgaacctgttcactgccggaaagatacggaggagcttggcattggcgtcggagactttgtgtcgtttgatccacgtgtcgagatcacatcaagcggatttattaaatcgcgccatttggatgacaaagcaagcgtcgccttattgctccgcttaattcatgaaattcaaacagaagacattgagctgccgtatacaacccattttcttatttccaataatgaagaaatcggttacggcgggaattcgaatattcctcctgaaacagttgaatatttggcggttgatatgggcgctatcggtgacgggcaggcgacggatgaatattcagtatcaatctgtgtgaaggatgcgagcgggccgtatcattatcagctcagaaagcatttagttcaattagccgagaagcatcatattgactataagcttgatatatatccgtactacgggtctgatgcgtcagcagcgatcaaatccgggcatgatattgtgcatggcctcatagggccgggaattgacgcttcccatgcatttgaacgcacccataaatcatctcttcgccataccgctaagcttctgtattactatgtacagtcaccaatggtataagggggaggaccaatgaagatttataagctgaaaagcacattcggttgggaaggtgatgacgggttgggagaacagctgattcagcagatccttgccggagaaaaaagcgccacgtgcgcgccgaaatcattgtattcaaaagatgaattgagggacgtttatcaaacagcgggtcagcttgttaccgtttatgataaacatgacaatccaagatgcaatataaaagtaacagatgtctttgaaaccacctttggtgcgcctgatatgaggttagtcaaaggagagggcaatggagaccgaattgaggagtttcaagaggatcatcggatggcatgggcggaactgatcaaaagcggtgaactggagctgaatgaggatactgttttgattacagagttgtttgtgcttgttaaagattaaaaaagcctgcggggcaagaaccccgcaggcttttcattaaccagaaatggttgcgttttgttctgttttcgattgggacataacagtttctgctttcgcaggattaaacatgccttcccatttagacatcacaacggcagcaagcgcgttaccagtcaggttgacaactgtacgtgccatatccatgatgcggtctacgccggcaataaaggcaagtccttcagccggaacgccgatggtgccaagcgttgcaagcaagacaacaaaagaagtaccaggtacggcagccatccctttggatgtcaccattaagacgagcacaagcgtaatttggtgccaaatcgtcaaatcaatgccatatacctgtgctaaaaagagtgcggcaatagattgatagagaacggaaccgtctaagttaaacgtgtaaccgatcggaatgacaaatgaaacaatgccttttggacatccgattttctccattttttccatgatacgcggaagaaccgtttcagagctggacgtactgaacgccagtaagatttcgtccttcatgtaagcaaggaacttgaagatgctgatgccggcaatttttgcgacaatcccgaaaataacaattaagaagaaagcaagcgcgacataaaccaatccgacgagctttccgagagagataagagaaccgagtccgaatttagacacagtcactccgataagagcgaaaacgccgaatggcgccactttcatcacaaggtttacaacgtggaacatggcatgggatacaccttcaaaaaaggctaatacaggcttgcctctttcaccgatcgcggaaatacccaatgcaaatagtactgtaaagcagatgatggctagaagatccccttcgaccaatgactggaagaagtttgtcggcacaatatggaggaacgtttccgccactgatttattactttgttctttttcagtttcaacatattgactgatgtccgatttttgagcttcgtgtatattaactcctgtacccggatggaagatgtttgcaagggctagtccgagaataatggcaaaagtcgtgatgatctcgaagtacagaatcgttctgaagcctaatttaccgacttgctttccatttcctgcaccggctacaccgatgattaagctggagacaacaataggaatcactatcattttgattaagcgtaaaaagagatccccgattggctgcaggtaagtaggcaatgctgggttgccataccaaatgacgccaacaatgacacctagaataagtccaacgaatatttgtgtggctaatccaaacttaattcttttcatagattacctcccaaaaaacaaagtatcaacatatatcatgaatagacatatatttaatctcactattagatcaaattataatagataagaaatcaattcgtctatagtaaattatatttcgaaaataaagaatattcaatgacattatgataatcaccagaattatctaaaaacaggtgagctttgacctaacctgactattatttcaaaattaagagatatgtgaaaaaataagaaaatcccacgcgtaaggcgcgggattttcgctcattacaaatcgtttacttttatacagtcattgcagatattaccataacactcatgctgctcttctatcttttttccgcattccgcacactttttcgaaggcaggtttctaaaaaattctgtgattttccccagcataaccaatccctctttcccctttgtagtgatttcattgtaatataacagattacaaaaatcaataactgttttgatacaatgtttaaaacatgcttttttcaagaaaaatgggtatattgaaggaggaccaatttttttgaaaagataggaggacattatgaaagttacagttatcggatgctatggcggttttccggccgcaaatgaagcgacgtcaggctatttgtttcagtcaggtgattactctctgcttgttgattgcggcagtgccgtattgtctaagctgttcggatatgtgccggcggaaaagctggatgcggtcgttctgtctcattatcaccatgaccatatcgctgatatcggaccgctgcaatttgccaagcaagtcggttcgtttctcggcaaaggagagcatacgcttccgatttacggacatgatgctgatatagaacagtttcaaaagcttacatataaaacacatacaaaagggatcgcctatcagccggatcagccgctgactgccggtccgtttacgatcacctttttaaaaacgattcacccggtgacgtgctatgccatgcggattactgacggcagccacactgtcgtttatactgctgattccagctatcaggattcatttataccgttttcgaaagatgctgatttattgatctcagaatgcaatttttatgccgatcaagacggaacaagtgcaggccatatgaacagcctggaagctgggcgcattgcaaaagaagccggagcgggagaactgctgctgacacatttgccgcattttggcgtgcatgacaaccttcgcaaagaagcgaaaaccgtttttaacggagaagtgaatattgcgaaatcaggttttgtgtgggaaggataaaggaggagcaccatgttatttatagacaatcaaaatatcaatgatccgcggatcaatcttgctatcgaggagtactgtgtaaagcatttagaccctgaacagcaatatttgctcttttatgtgaatcaaccgtctattatcattgggaaaaaccaaaatacaatagaagaaatcaatacaaaatatgttgaggaaaacgggattatcgtcgtccgccgtttatcaggcgggggcgctgtgtaccatgatctggggaacttgaacttcagctttattaccaaggatgacggggacagctttcataactttaaaaaattcactgagccagtgattcaggcgttacatcagcttggggttgaagccgaattaagcggccggaacgacattgtagtagatggccggaaaatatccggaaacgctcagtttgcaacgaaaggccgtattttcagccacggcaccctcatgtttgattcagccattgatcatgttgtatcagcattaaaggtgaaaaaggataaaattgaatcaaaaggcatcaaatcgatcagaagccgagtggcaaacatcagtgagtttctcgatgataaaatgaccaccgaagaattccgcagccatttgcttcgccatatttttaacacaaacgacgttggaaacgtgccggagtataagctgacggaaaaagattgggagaccattcatcaaatttcgaaagagcgctatcagaattgggattggaactacggccgctcaccaaaatttaaccttaatcattcgaagcgttatccggttggatcgatcgatttgcacctggaagtcaagaaaggcaaaatcgaggactgcaaaatcttcggagatttcttcggtgtcggtgatgtatctgaaattgaaaacctgctggtcggaaaacaatacgaacgcagcgtcatcgctgatgtgctcgaaggtgtgaatctcaagcattactttgggaacattacgaaagaggatttccttgatctgatttactaaggcaaaacacatcgtttgaaagagcggttgtgtttttgaaataatggaggcaggagggattcacatgaaagtgtttttaatcggagcgaacggacaaatcgggcaaagactcgtctctttattccaagataatcctgatcattccatcagagcgatggtcagaaaagaagaacagaaagcgtctcttgaagctgccggtgcagaagctgtgcttgcgaatctggagggcagcccggaagaaatcgccgctgcggcaaaaggttgtgacgcgatcattttcacagccggttccggcggcagcacaggctatgataaaacgctgctggtggatcttgatggagcggcaaaagccattgaagctgcggccattgccggaatcaaacggtttattatggtcagcgccctgcaagcccataaccgtgaaaattggaatgaggcactcaagccttattatgtggccaagcattatgctgataaaattctggaagcgagcggtttaacctatacgattatccgtccgggaggccttcgcaatgagcctggaacgggaactgtttcagcagcgaaggatctggagcggggatttatttcccgtgatgacgttgcaaaaacggtcattgcctctttagatgagaagaatacggaaaatcgggcctttgatctgacagaaggagatacgccgattgccgaagcattgaagaaactatgacagtactgacactcagggctttttgctcttgagtgtttttttctgtttctctataatggagaagaaagcttggcttcaataatgaatgactattcattcacttaaggggtgggagaatgaatcttgtttcaaaattggaagaaacagcatctgagaagcccgacagcatcgcatgcaggtttaaagatcacatgatgacgtatcaagagctgaatgaatatattcagcgatttgcggacggccttcaggaagccggtatggagaaaggggaccatttagctttgctgcttggcaattcgcctgattttatcatcgcgttttttggcgctttaaaagctgggatcgtagttgttcccatcaatccgttgtacacgccgacagaaattggttatatgctgacaaatggcgatgtaaaggcaatcgtgggcgttagccagcttttgccgctttatgagagcatgcatgaatcgctgccaaaggttgagctcgtcattttatgccagacgggggaggccgagccggaagctgcggacccagaggtcaggatgaaaatgacaacgtttgcaaaaatattgcggccgacatctgccgctaaacaaaaccaagaacctgtacctgatgataccgcggttattttatatacgtcaggaacgactggaaaaccgaaaggcgcgatgctgacacatcagaatttgtacagcaatgccaacgatgtcgcaggctatttgggaatggatgagagggacaatgtggtctgcgctcttcccatgtttcacgtgttttgtttaaccgtctgtatgaatgcaccgctgatgagcggcgcaactgtattgattgagcctcaattcagtccggcatctgtttttaagcttgttaagcagcagcaggcgaccatttttgccggtgtgcctacaatgtataactacttgtttcagcatgaaaacggaaagaaagatgatttttcttcgatccggctgtgcatttcgggaggcgcgtccatgccagtcgcgttgctgacggcgtttgaagaaaaattcggtgttaccattttggaaggctacgggctctcggaagcatcacccgtcacgtgctttaacccgtttgacaggggcagaaagccgggctccatcgggacaagtatcttacatgtcgaaaacaaggtcgtagatccgctcggacgcgagctgcccgctcaccaggtcggcgaattgatcgtgaaaggccccaatgtgatgaagggctattataaaatgccgatggaaacagagcatgcattaaaagacgggtggctttatacgggggacttggcaagacgggatgaggacggctatttttacattgttgaccggaaaaaagacatgatcattgtaggaggatacaatgtgtatccgcgggaggtggaggaggtgctgtacagccatccggacgtcaaggaggcggttgtcatcggcgtgccggacccccaaagcggggaagcggtaaagggatatgtggtgccgaaacgctctggggtaacagaggaggacatcatgcagcactgcgaaaagcatctggcaaaatacaagcggcctgccgccattacgtttcttgacgatattccgaaaaatgcgacggggaaaatgctcagacgggcactgagagatattttgccccaataaaatgaaaaagcgaagcggttagcttcgctttttcattttcaatcctttgcttcttttttaataatatttagcagcgcctttgtatcatttttgcttaatttgtagtatgtgccatccttcaaaaaaacggcttgctggctgccgtcaatccatagtctgaatgagtcataccggtctttatgaaacttgattgtcccttcgtaatcaggggctgatgttttttctgtcttcacctgttttccctgattcataatatccagcatatctttgacgtgctgtcttttttcaatctcgatatcttcctggccgcttgaagacagtgtgatcaaatccgcgtctaccgattgatacacatcgcctgatcggctgtaaagataaaaaaatgcgataaacacaagaccgattaccacgatggctgccactatttttttcatttgcatcactccaaacattgttagttttcccagcgatcggggtttccatgcttaaaagggtggaaaagtgcggaacacagcttggttctaagaatttgaatttatgattacaatagaagtaacgggttgatgtgaggagtgaggcgttatgcgcaagtggattgcggcagcaggacttgcttacgtgctgtacgggctgtttttttattggtattttttcctgtcgggtgattccgcaataccggaagccgtgaaagggacgcaggctgatccggcttctttcatgaagccgtctgagttggcagtggccgagcagtattcgaatgtcaagaattttttattttttatcggggtaccacttgattggtttctgttttttgttctgcttgtcagcggtgtttcaaagaaaatcaagaaatggatcgaagcggccgtgccttttcggtttttgcagaccgttggttttgtgtttgtgctttcgctgattacaacattggtgacgctgcctttagattggataggctatcaagtatcgcttgactataacatttccacacagacaacggccagctgggctaaggatcaggttatcagcttttggatcagctttccaatctttacgctttgcgttctcgttttttattggctgatcaaaaggcatgaaaaaaaatggtggttatacgcctggctgttaacagtgccgttttcgctgtttctgttttttattcagccggtcattatcgatcctttatacaatgatttttatccgctgaaaaacaaagagcttgaaagcaaaattttagagctggcagatgaagccaatattccggctgaccatgtatatgaagtgaacatgtcagaaaaaacaaatgcgctgaatgcctatgttacaggaattggggccaataaacggattgtattgtgggatacgacgctgaacaaacttgacgattcagaaattctgtttattatgggccacgaaatgggccattatgtcatgaagcacgtttacatcggtctggctggctatttgctcgtgtcgctcgccggattttatgtcattgataagctttacaagcggacggttcgcctaacccgcagcatgtttcatttagaagggcggcatgatcttgcggcacttccgctgttattgcttttgttttctgttttgagctttgcggttacgcctttttctaatgctgtctcgcgttatcaggagaataaggctgaccagtatgggatcgagttgacagagaacagagaagccgctgttaaaacgtttcaggatttggccgtgacggggctgagccaggttgatcctccggtgcttgtgaagattttcagaggcagccatccgtcgatcatggaacggattcaacatgcggagaaagaagagaatgcgccggaacatcaggatgctgacaaataaaaagaagcaggtatggaggaacctgcttctttttactattattgtgcagctgcttgtacgttgattaacccttttccatagtagaaagagtttccaagatatgttgcagtgctttctaaacgatcacggacttgcgcgtttgtccaagtcgggtgcttagaaagaattaacgctgctgctccggcaacgtgaggagtcgccatggacgttccgttataagcgccgtaagtgcctccaggaagtgtgctttggatggacacgccaggagccatcacatcaagctcagaacctgcgctggagaatgaagctctttggttgctgctgtttaccgcacctactgcaatagtagaaggatattttgcagggtagccgactgtgcttgtgcttccggatgaaccttcgtttccggctgcggcagcaacgacgataccgctggaaacggctttgtcaacgactgttttcagcgctgtagaaccagtaggtccgccaaggctcatgttgataacatccatattgttggaaatggcccactcaatgccgttaataatccagctatattggccgcttcctgttgaatcaagcacttttactgcatataatgatgcgcttggcgctacgcccagaacaccgattgagttattaagagcggcaatcgtaccggctacatgcgtaccgtgagaactgccgtcctggtatgggtttgtttcagaaggtacgaagcttgctccgcctctgacgtttaagtcaggatgagaagagtcaattccgctgtcgataacagctacttttacgttagagcctgtgtagccttgagagtgaagagccggcgctttaatttgagaaatgccataaggaacagattgcgcatattcatgtgcaatatgatcttcttccacatatgcaacgctcggatcttttttcaattcttttacagctttttcatccaatgttgctgcggccgcgttaacatacttaaattgcttttgaacctttccgcctttttcagaaataacatcctttttcttggcggaactcatggcactcattgtctgtttaaatccgacaatgtatttcttttctgtactgctttttccggcagcctgcgcagacatgttgctgaacgccatcgtaaagattaacgttaacgcaaacaacaagctgatccacaattttttgcttctcactctttaccctctccttttaaaaaaattcagagtagacttacttaaaagactattctgtgaatttattgtaatagatggaataatattttagtagacccatttttttgagatgattttatctctatttaggtatatcatctctcgctatttccgtagagactcgaaataactattttcatacagaaaagaacgaaaatagacatgagtaaatgttcattatgctgaaatgtcatgcttttttaggttaaatgctcctgagtcccggcaaattcctgtcgaaaaaattcgttcaaatgacctgcgtgtgcttccgtgagaacaatggatattatcgtgatattttttcaaagcatgatgataaaagtattctgaaaaataaactttacagaaaagggatagaatgaaaaaattattgagagggaggaagaaataagatgaacattcgccaagcaaagacatcagatgcggccgccattgcgccgctgtttaaccaatatcgggaattttatagacaggcatccgatttgcaaggggcagaggcttttttgaaagctcgtttggaaaatcacgagtctgttattttgatagcagaagaaaatggagaattcataggctttacccagctctatccaacgttttcttctgtgtcaatgaaaaggatatacatattaaatgacttatttgtcgttcctcatgcgcgtacaaagggagccggcggccggctgctttctgccgcaaaggattatgcagggcaaaacggggcaaaatgtttaacacttcagactgagcaccacaaccggaaggcaagaagcttgtatgagcaaaacggctatgaagaggataccggatttgtccattattgtctcaatgtgccggcgaagtgaaaatggcggcttgatgatttggttttttgaacgttcttcggttacgatataaatgaaaaggagtgtgccgaatgtcaacgttatttcaagccttgcaggcagaaaaaaatgccgatgatgtttcagtccatgtgaaaaccatatcaacagaggatttgccgaaggatggtgtcctgattaaagttgcttattccggcattaattacaaagatggtctggccggaaaagcaggaggcaatatcgtcagagagtatccgcttattttaggcattgatgctgcgggtacggtcgtctcttccaatgatccgcgttttgcggagggggatgaggtgatcgcgacaagctatgagctcggtgtctcacgtgatggcggattaagtgaatacgcttcggtgcctggtgactggctggtgcctttgccacagaatctttcgttaaaagaagcgatggtgtacggaacggcgggatttactgcggcgttatcagtgcatcggcttgaacagaacggtctgtctccggaaaaaggcagcgtgctagtcacaggagcaaccggcggtgtcggcggaattgcggtatcgatgctgaacaagcggggttatgatgtggtggcaagtaccggaaaccgggaggcggctgattatttgaaacagcttggtgcaagcgaagtaatcagcagggaagatgtctatgacggaacgcttaaggcgctgtccaagcagcaatggcagggagcggttgatccagtcggcggaaaacagcttgcctcgcttttaagcaaaattcaatacggcggatctgtcgcagtgagcggcttaaccggcggaggagaagttccggcaaccgtgtatccttttattcttcgcggagtaagcctgctcggaatcgattcagtatattgtccgatggacgtcagagccgctgtttgggagcgcatgtcttctgatctcaagcctgatcagctgctgaccatcgtggacagggaagtatcattggaagaaacgccgggtgcgttaaaagatattttgcaaaatcgcattcaaggaagagtgattgtgaagctttaacaggatcagcttgcagagaatgttatttttctgcaagcttttttgtggacaggatgatcagctgctgaactgctgtgtcgcgaaacaagattttcctgtaagccgaactttctcttctcattttaaaaataattggtgataatgattctcattccgtgttatactactcttggacatcttaaccatagaaactaccaacaggagagactggaacatatgaaaaaaacactgattattcttacagttttacttctttctgtcttaacggctgcttgctcgtcttcaagcggcaatcaaaacagtaaagaacataaagtggcggtaacacatgatttagggaagacaaatgtgcctgagcatccgaagcgggttgttgttcttgagctaggttttattgatacactgcttgatctcggcattacgcctgtcggggttgccgatgacaacaaagcgaagcagctgatcaacaaggatgtgctgaagaaaattgacggctacacatctgtcggcactcgctcacagccaagcatggaaaaaatcgcttcattaaaacccgatttaattattgctgacacgacccggcataagaaggtgtacgatcagctgaaaaaaatagcgccgacgattgcacttaataatttaaatgctgattatcaggatacaattgacgcttcgcttacgattgcaaaagcagtcggcaaggagaaggaaatggagaaaaagctgacggcgcatgaagaaaagcttagcgagacaaagcagaaaatcagcgcgaacagccagtccgtgcttttgatcggaaatacaaatgataccattatggccagggatgaaaacttctttacatcgagacttttaacacaggtcggctaccgatatgcaatcagtacgtcaggcaatagcgattcaagcaatggcggcgactctgtgaatatgaaaatgacactggagcagctgctgaaaacagatccggatgtgatcatcctgatgacaggaaaaacagatgacctcgacgccgacggtaaacgcccgatcgaaaagaatgtcctttggaaaaaactgaaggcagtgaaaaacgggcatgtataccacgtggatcgtgcggtgtggtctctgcgccgcagtgtagacggggcgaatgccattttggacgagcttcaaaaagagatgccggctgctaagaaataaaagaaaagacaggcaaacgcctgtctttttcttatttgataaagccggataagtggctgttgatattatagtcttttatccgccatttttcttctgcaaattcaatgttgctgaggcaggcgttgacgagacgggtgctttgaagctccgggtcaccgccggatatttctgtcagcagggcgtgaattgccgcaccgtgcgccacgatcagcaccttcttgtttggatacgcctgattcacttttgccaaaccgcccatcagcctgtcagtgagttcttctaaggtttccatattcggatagatgttatctggatagcgctttgtccgttcctccagcggcatgccctccgcgtcgccgtaatcgcgttccttaaaatcatccatctcgactatcggaagatgcagatattcattaataatttccgcggttcttttcgctcttttcagcgggctcgtcacaataatatcccaagaaaagtcctttacatattctccggtttctcttgcttggcgttcacctgttgcgtttagcgggatatcggttttgccttggcatttttgctgcaggttccaatcggtttctccatgtcttactaaacaaacggctgtcataaaatccccttcctgactttattcatatcgctattatactaaatcgaaagcgtgtgtcctatgaaaaagcctatgcaagaacttcaaataataaagccagtccgattccgccgccgcttccgatggctgcaacagcatattgacagtctggccgtcttttcgcttcataaaacaatctggttaccagagctgcacctgatgcaccgtacggatggccaagagctaaggcgccgccgcgcacattgatttttgaaaagggaatgccgagttcttgcgagcagacacaaattttgacggcaaaggcttcattgatttcaaataaatcgatatcatcaggtgttacatcgtgtgtatgtaagagctgacgaatcgcgacaaccggtgccgcgggcggaaagttggggtgaatgccgctgacagcgctgccgataaaccgaagcacaggcttaagtcccagggctgctgctttttcttcttccattaccaaaagagcggctgctccgtctgctatgccactgctgttggctgctgtgactgttccggagctggtgtcgaaaaccggctttgcacggggaataatcgcttctattggccgcgttttcaaaaatgcttcgtccgtctccaattccccgagagcaacaacttcttcacggtaaaatccttcatcatgcgcgttcctgctgcgttgatggctgagaagcgcgtactcatcctgcatgcttctgctgatggaatagcgtgcagccgtatattctgccgcaatgcccatgtctggatcgccgatcgcatctggagaaaagcgagcccgttctgaaaaaggggattggctgctgctttctgagccgcccgcgatatacatcgtgccggctcccgcttgaataaggctgcaggcatagcgcacagcttcaaggccggagccgcactgtctgtcaattgtcattccgggaaccgataaaggcagtccggcttgaagggctgacagtctggccaggttgccgcctctgccagtagcgtttccgagaatgacctcgtcaacttgatcctctagctttcggctgagacagcggatgatgggagccgccaaatcctccggcaggaagggcttcagcagtccgttttgatttccaaagatcgttcgttttgcatcaacaataaccgcattcatttatactgtacactctcttccagccattttttcactctggaacgggcaatttttccgctgctcgtttccggcaagctgtctgcaaacacccattttttcggaattttataggaggctaatttctgtttacaccaggctttcagtgttctggcattagcgtttccaagaatgacagctacagcgatttctccccaatactcgtcgggaatgccaacgacagccgcgctttcaacctctgggcaggcgagaagcacacgttcaatttcttctgggaaaatatttaatcctccgtacacgatcatcccgttttctcttcctgatatgtatagaaagccctcttcatcaacgtagcccatatcatctactgtcatccattcatctggtgtgctgccgttcacatagccggaaaacctcatcgggcttttgacaaatatttttccgatttctcctggctggcagcgttctcctccagcgttgcggatttcgatccggacattatgaaaagggcggcccgctgaatgcggcttccgtttgctgtcttccggtgaagaaaacgtcacaaaactaagctctgatgtgccgtaaaaatcgtacagcttgagatgaggccatgcagcggcaagcttcttcttggattctgccggccagtctgcgccggatgaaatgattttgacgggactgtcgggaaaaccctcaatccttgcgagggcgtctgtcatcgtcggtacggtatagagaacactgatggattcacggcacagccattccttcgctttggcaggagaaaactttttcagcaaacaaacggttcctccgagaaacaaagtgctgacagccccatataggaagtgagaggacattaacgctccgggaatcagaaccttatcatctgatgaaatcgaaaaatctgtttctgtacaggtaaagctctccatccatgagcggtgagatcgcgtaaaggccttcggttttcctgtcgagcccgacgtaaatcccatataaaaagggtgctccggatcaatggtaggcaagggatcagcggctgcctcagaaatatctgccatacagttatccagcaatacaacaggtgtctggctatctgtcagtttgtttttgaaaaaggctaaagtaaccacaagatccgcattgcttatggacagccgctccttacattcagccgggctccagcgtgtgtcgatgggaatggccgtacatccagccgctgcggctccggcaaacagctgtaaaaacgcgagactatttgggagcaggatcgccacacgattcggcatgctcggctgtgaccgcagccaatttgcggtttgagagacaagccgatcccaatcatggtacgtgatttgctccgattcagtctggatcgctacacggccgggcgatgtttcggcagtagatgaataggtatgagtaattgtcatgtattgtcatcctccttttgtaaacatcgtatcagaaagagacaaggcttgagtgatttttatcgccagaaatgcagatacagccgcttttatcaaatcaccaggcacatatgcaaggctcatgaaggcggcctgtgacaaatcaatatgcatgataaaagcttgtaccggtataccaagcagataaataaagatgatgccgaatacgatatgagtgaaaaagagacgcaatactgtcaccttccgcagcctgttagcggctaaactgatcagccatgaagcgaggggataagcaatcaaaaagcctgcgctcggtccgaaaaacacaccaaaaccgcctcgtccgccgggcaacagcggcgctccgaaggcgacgagcagcaaaaagacaagctggcttaagaaagcagactttggcctgagaatgctgcctgccaacatgacaccaagcgtttgcaatgtaatcggaacgggtgtaaaggataagaagagagggggcataaagccgagcactgccatcagcgcggtgaaaatcgcaatatgcatcatgtcgattaatttcagcatgtgaaatcctccaaaaagtaatcaaatatggttatacaataaatgcaggtaattattatgtcaactgatttttaatttaagtttacataatgaacgcaaaaaaaccggccgtatggcagaccggtttttgatggttattcttctgtcaggatgacaagcgaatcaacggaagcggccacatgggaaacggcgcggctgacttcctgaagccctccaagaaaggcttgcagatcgacgtcgattttgcctgattgctctttgctgattttcatgctgtggacgatttcatcgaataagcggttaatttgcgtcattttttctttactttcgctgactagctcattcacgtctttgatatgcttggatacaatgttgatttgtgtattcgtattgttcacaagctcagaaacagtagagacggtttttttcgtatcctcagaaagcttccgcacttcatttgccacgacagcaaagcctttgccgtgttctccggcgcgggcggattcaatagatgcattgagcgagagaaggtttgtttgttcagctatgcctgtgacgatgccgaagattttttcaatttgctgcgcgatttcatccagcttgaccatttctttttcgatttggacaaggcttgtgtcaattttgttcatctgtttttgctggacttctagctctttttttccgccgatcgacttttcttcaacagtgctggatgttacagtgccggctttggatgcttgagaaatgccttcagatttgtccacaagctcttgaactgatctgcttgtttctgaaaacagattggcaatcgatccagaggtttcttgaattttctgatgaagaaggtttttcttttcttcttgttcatcacgggtctggttgtactcgctttgaaacgcttcaaggacaagctgctgttctaagttcaagatttttgttgttgctttaatggcttttagcagttcttgctgatttgtaatggacgcttcataaatgtcaatcattgacaaaaggagctcttgaaacgcacccatataccattttggcaaaaggccgattcttaaatggatggaggcgattcggttacgcttttcaataaattcatcatcgataacgcctgcaaacatttcctgaatatgccgttttaacgtttgttttaagcggtcaactgagctgtgatcattaatgatatccatcaatgagctttcatggtcaaggtttttataaaacgcatcgacgatatttacgatattttcttgaatgagtggctgaagctgctctaacacataaagctcagcatctcccaacctgaccattttgagctgttttttgacatctgcatgtttgtttgtgagctgaatgcggtttttttgttgtccgtttgaatctgaaaagtaagctgtttcttgttttctgtcttttttaaataacaatacaatgatcccccttgggaaaaatataatttttactttttggctttttaagcctttttcttttttatcggccaagggaaacatgaatgaagctgcagatgaaaaatatttgaaaaaacgttcattaaaatgaacggtttaatcgagatctatttgttttaatggtttaatggccggaccctctacaacttcgccagatggcttaaagcgtgatccgtggcacggacaatcccacgtatgctcactgtcgttccactcgacctcgcagcctaaatgggtacaagtcgtatcaacgagatggaggcagcctgtctcatcacgaaatgctcccgctcgcctgccgtttatggtgacggctttcccttctcctggcgaaatgtcttcaaattggacatcaggcttttcaagctttccttttatcaaatgcttggcgacatctgcattgtaggaaatcactttctgcaacccgggattcagatggaaacgggacggcgtgaaaatgctttcgtatgggttttcttttttctccacaaggtctgacaataaagtggctgcgactgctgaggacgtcatgccccattttttgaacccggtcgctactagaatattgtcctcattttccgacatcggcccgataaacgggattttgtcgatcgtcactagatcttgggtggaccaataatatggaatgctttcgatgccgatggtgctttcggccagttgtctcagtgtttcataatgtgtagacatggcttttccctggcctgttttatggcttactccgctgaagagaatcagcttttcaccgtttacaaccgtatagcggagcgccactgacggctgatcgatactcaaatacatgccctcgggatactcgatcttcggcttgatggcaaggacataagatctgtcggagtacattctcgcagcatataatccgcctccgtcataaaaagggaagtgggaacagcatatgataaagcggctcttaatggcgtgccggctttttgttaccacttcgggcctttcgccttttttgatatcaagcgcaacggtctcttcataaattcggccgcctttttgaacaatttgctccagaagcgcttttaagtattgaagcggatgaaattgagcttgattcttcatgacaagcgccagcttagaacctaagggaattggaagatccttgataaggtctctttcaattccgagctttgtgtatgcctcatgctcggtgtggattttttgaacagcgttttcatttgccgtataaagatatgcgtcttgctcgatccattcacaatcaatttgatgttcatccacaatgccttttatgtaatcaattgcgttttggtttgcttcataataaagcctcgcatggtttaatccgaaatggcggataaattcgtcgtatatcatgtcatgctgtgcggtaactttagcagttgtatgcgcagtggttccgttaagaacctgatttgcttcaatcaaaacgacacggaagcctctcttcgtaagttcatatgccgttgtgattcccgtaatcccgcctccgataatggtgacgtcacattcagtgtcctcttgaagcgcaggaaaagaaggcaggtcagttgatgttttccagtatgtttcaggtgcttcctttgcaaaatgttgattagccaagccgttatacctccaatcagatttattcttaatttttccatattctatcttttcatacataggaagcaggcattgttcataacataataaggttgaaaaggagtgatttcattggcgaatcaaaaaaagaaaacattaccgcctcagcaccagaaccagcagcctggttttgaatatctgatggacccgcgtccggtttttgataagccgaagaaagcgaaaaaattagagggcaaaaccgctattattactggaggagacagcgggattggacgcgctgtctcggtgttattcgcaaaagaaggggctaatgtggtcattgtgtatttgaatgaacatcaggacgccgaggaaacaaagcagtatgtagaaaaggaaggggtaaaatgcctgctgattgcaggagatgtcggggatgaagcgttttgcaatgatgtggtcgggcaggcaagccaagtgtttccatccattgatatattggttaacaatgcagctgagcagcatgtccagcccagcattgaaaaaatcaccagccaccagctgatcagaaccttccaaacaaacattttttccatgttttacttaacaaaggcagtgctgcctcatttaaaaaaagggagctctattattaataccgcttcaattaccgcctataaaggcaataaaacgctgatcgattattcagcgacaaaaggcgcgatcgttacgtttacaaggtccctttcccagtcgcttgttcagcagggcatacgggtcaatgcagtggcaccgggtcccatttggacaccgcttatcccggccagctttgccgcaaaagacgtggaagtgtttggttcagacgtgccgatggaacgcccggggcagccggtcgaagtggcgccaagctatctataccttgccagcgacgattccacatacgtcacagggcagacgattcacgtcaatggcggaacaattgtgaacggataataaaaagccaatccttgaaggattggcttattcgctctgcttgagcgctgcatattctttagagagcgtaagaaacgcatctttatctttttcgtccaaggctttgttaatttggtccgtcagcatggcaagccgacggttatacaaggattcatcgagcaccatttgaatgtaaatatccgtcattgtgacatcgaattcttttgttttttgcgtgttgcgggacttcatgagctcagtgtacgattttttctctttcataaagaatccccccaatgccttttttatagtatatggataacggtcgaaaaaatcaataaatttttataatttttagacaactaatacttggcaatctatcgacatatcctgcaaaatgccgtaaaccggcaagtcttatgaaagtaaaatcggtttattactagtcatttagtaccattaaatatcattaaaagatgattttatcttaaatgttaaaaaaacctgtcgttttacaaaaacagatgatagattattagtataaattttgcagaaaaaggatggaggccataatatgagtcagaaaacagacgcacctttagaatcgtatgaagtgaacggcgcaacaattgccgtgctgccagaagaaatagacggcaaaatctgttccaaaattattgaaaaagattgcgtgttttatgtaaacatgaagccgctgcaaattgtcgacagaagctgccgattttttggatcaagctatgcgggaagaaaagcaggaacttatgaagtgacaaaaatttcacacaagccgccgatcatggtggacccttcgaaccaaatctttttattccctacactttcttcgacaagaccccaatgcggctggatttcccatgtgcatgtaaaagaattcaaagcgactgaattcgacgatacggaagtgacgttttccaatgggaaaacgatggagctgccgatctcttataattcgttcgagaaccaggtataccgaacagcgtggctcagaaccaaattccaagacagaatcgaccaccgcgtgccgaaaagacaggaatttatgctgtacccgaaagaagagcggacgaagatgatttatgattttattttgcgtgagctcggggaacggtattagaaaaataggaaggagctgaccgaacagggcagctcctttcataaagctatgccgtcggaattcctccggtgatgccatatacctgagatgtcacatagcttgaattctctgaagctagaaatacataaacatcggccaattccactggctgcccagcgcgatttaatggagctggcggcgtgccttgtccgaatttcgggatgttttccgtcggctgtccgccggaaatttgcagcggtgtccaaattggtccgggcgcaactgaatttactctgatgcctttggaagcaagctgttttcccagtccgacggtaaagccgataatggcgtttttcgttgctgcgtaatctaacagcatcgggcttggattatagccttcaactgaggtagttgtgataattgaagctccctccggcaaatacggaagcgccgcttttacaacccagtaaagggaaaagacgttcacttcaaatgttttatagatttgttcagtaggcagatcttcgatgttttcgaccgcttgctgtttgcctgcaacgagcgctagcacatcaagtccgccgagttcgtgatgcgactgtttgactagatcttggcaaaaggattcgtcgctcaagtctccggggatcagcactgcttttcggccttctgcttcaatcagctcttttacctcttcagcatctggctgttcctcgggcaagtagttaatagccacatcggcaccttctctggcgtaagcaattgcggcagcgcggccgataccggaatcgccgcccgtgacaagcgcttttcgacccgttagtttacctgatcctttgtagcttttttctccgcaatcagggacaggcttcatgttcttttgcaggcctggcggttcttgatattgttcgggaaattcatcatgaaaaaatgcttttataggattcgtaagatttgaatcagacatcagcaacgctccttttctgtttggtgtacattcgtatgtgtacccctgagcataagcagaaaaacatgttttggcagtttgaatagtgaaggaaaaagaaaacaagaaaaaacaaagccttcttccatatttatcttgtcaaataagactatatgaattatgataaattcgagctataaatcaactaaatattgggtgttgggagagtgaatcgtcatgaaaaaagcggcggcggttttgctgtcactcggtctcgttttcggtttttcatacggagctggccatgtggcggaagccaaaacaaaggtgaaggtctataagaactgcaaggagctaaacaaagtatacaaaggcggagtggcccgcacatcgaaggtgaaaaacaaaggcggaaaaacgaagtacaagccttacgtttctaaggcactttacgatgccaataaaaacaaagaccgcgataaagatcttatcgcctgtgaacggtaaataagaaaaagcaatctggtgtccagattgctttttttatgcttaggccgcctgatcggccgcagcgcttttcgccttccttgtcataaggctgactgccatcatgaccgtgatattcaaaagcagggcgacgatgccgacattcaagtcttttgcggcttgcggcagagccggaaataaagtgccgatcgtcgtttccgtcattgtaatataagtaactgctccgacacctgcaataatgccggcgaaagctccttgctttgtcaccatattatgcttgagcaggctgaacaaaagggcggggaatagctgtgtgacaaggctgtagcccatcaaaagcagcgtaacgatggtattcccgcctttgaaggtaaaatacaccgaaatcagcgcaatcaccggcactaaaaacttagcaagcgccgatacttgctgttctgtcgtgcggggcgcgattaccttgtacacattttttgcaaacagtgtggaggcggacattaagatcatagaccctggcacaagtgctgtcagcagtccggcagcaccgataattccgacaaaccaagggtcaaatgcttgcagagacagtctcaaaagcgacaaatccccgtctgcgccattcagatctggaacttgcaggatagccgcaaagccgacgaaaaggacgaagagcaggaccagctggtacaaaggcatgatgatggcgtttttacgaaacacttttgggttttcggctgaatacgaagcggaaaacgtgtgaggccacatgtaaaaaccaagcgctgtcaagagtacggttgaactgaaccaggccacactttgtcccgattcggggagcgtaagaaagccaggctttgccgtttcaatctgctgaaacatgtcttgaaatccgccgtagtaatgaattggcaaatacacacctaaaaacagaacgacaaccagaatcatgatgtccttcacaaccgatatccaggcagacccgtgaatgcctgaaaccataacataaaccgtgatggaaacagcgccgatccagatggcagcggtcggggtgattttgccgtacgaggtttccgatacaatcagcccgaggcctttcagctgcagtacaagatagggaatgagtgcggcgatgccgaccagtgaaacgagaatgccaagcagcggactgttgtatttttttgtgaaaaaatcagactgcgacatcagtttatgctgtttcgcgtacgtccaaactgctggaagaagccagtaagaaaggatgtaggccagacatccgtaggcgatgatataaaaggctggaccgccttttccgtaggcccagccgctgccgccgagaaacgtaaaagtagtataaatttcgcctgccatcaaaaggaagacgaaaacagttccgaagccgcgccctccgaccgtccactgctccaggttcatgtcttttcctttttgggcgcgtataccgagaaaaatactcaagagcaggacaccgaagatgatgatgagagctgcattcattctgcttcctcctttttattttccttgtcgaggacatacacaatcgccatcagcgcagaggtcaaaagagcccacatcacaatataggcaagaataaacggcatgccgaacacatagggggtcaccttatttgcaaaagggatgccgagtaagattccgataaagggtaaagcggcaagaacgtgaatcagtttcatagaatcctccttctatttaggattgaggtgtacaagcctaagcgtactgaaaatgatgtcgcagatatcgcagcacatgtcattttttggagtgaaaggctgtggttcgaattataaataaatttattttgtttgtatagtgtgaattgtctgaaattaatgctctgaatcgcccgaagagggaacgggcagtatgattcaaaaggctcagagtctgtctggggcaaatagatagtatgttaataattcgctgacctgctcacggattcgcggattaaaatagcgatggttttcttcataaccgtcgatgacaaatgtatagagtgtaaaggcctcatcgcgttccgtctcgcggattgcaatttttcttttcctcagttcttttctgacctccatcaaatccttttgtgctatttttaatgattcgctgataagctgtttataaggatgcttcaattttaatgtgctttcttcaattccggcgagatcacggttaaaaatcgtaatggccatgggcaaaaagagagcccgttcaattaaatcgtatatttcctcctgcagatttggcatattgactccttctttctaagggaacgtttgttctatttgtattctatatcggctggtgaaatgtttcaagacagaaaaaatcaccaaaactttttagttttctgctgataatgtgtagaataaggatagacaaacccggtaaggagtataaatgttggagcattttttatcctatttgacacaagaacatttaactgaattatttcaaagctatagggctttcggtccgctcattgctgtgctgctgcctttaattgaagcatttctcccgtttttgccgctgatcgtgtttgtggtggcgaatacgaactcgtttggcttgtgggaaggattcatcctatcctgggcgggatcaactgctggttccattctcgtctttttgattgtccgtcaatacggacagagaaaattgcttggatttatccgcagtcatccgtctgtcagaaagctgatgttatgggtggaaagacacggcttcggtcccatgtttcttctgctttgttttccatttacaccgtcagccgcggtgaatgttgttgccggtttgtcaaggatcggaacgcggccgtttattttggcggcagcctcggggaagcttgtcatgatttttatgatcagcttcatcggatatgatctgcacgcgctgattacacagccgattcgaacggtcatcgccgtattggtgatcactgtcttatggtatgtcggcaaaaaggtggagcggtatctgcatgtaagagccagtcagcgtgagcatgatggagggagacagtaacatgaaaaaacggttttggtttcttgccggtgtagtgtccgttgttctcgccattcaggttaaaaatgctgtctttattgattacaaggtagaaggcgtcagtatgaacccgaccttccaggaaggaaacgaattgttggtcaataaattttcgcatcgatttaaaaccatccatcgttttgacatcgtcctttttaaaggccctgatcataaagtgctgattaaacgggtaatcggcttgcccggtgaaacgatcaaatataaagatgatcagctgtatgtgaacggaaagcaggttgctgagccatttttgaagcatttgaaatctgtttctgccggcagccatgtaacgggtgatttttctttgaaagatgtgacgggaacaagcaaggtgccgaaaggaaaatattttgtcgttggagataatcgcatatacagcttcgacagccggcattttggtccgataagagaaaaaaatattgtcggtgtgatttctgatgccgaataaaaagacgctaattgaagaggcgtctttttgtatgccgtttggaaaaatgtgttgaagaaaaatttgtaaggagctataatcaaaattgttacctgtgtaacaaaatttatatatttttttgactggagggccgtttttattggtttttgttcgtttttcatgaaacaaaaggagtggtgaatgatgatgaaatatgaagcagtgattataggaggagggccggttggatttatgctggcttctgagcttgcaatagccggagtgggaacatgtgtgattgaacggcttgaaaaacctgttccgcattccaaggcgttgacgctgcacccccgaacgctggagcttcttgagatgagagggattttagagcggttcgtatccaagggaagcaagatacctaccggacatttttcaatgctggatacccgtctggatttttcaggcttggatacgagctgtccttacacgcttttgctcccgcagtccaaaacagaaaagcttcttgaagatcatgcacgaagcctgggaacagaggtgtttcggggtgccgaggcgctggcggttacgcaaaacggggaagcggtccaaacaatttttaaggatcgggacggcagtgtacggacgatcacaagcaagtttgccgttggggcagatggcgccgggagtaccgtccggaaacaggcgaaaattgagtttccgggaacagacagcactgtcaccgctgcgcttggggatgtggtgctcctttctccgccgccgtcaggtgtgctgtccctttgcacaaaagagggcggtgttatgattgttccgttatctccagaccgataccgtgtcgttgtgatcagcccttatcgcacacaaacgccgaaagatgtgcctgtgactgaggaagagctgaaagctgacctcctgcgaatttgcggaactgacttcggtttaaccgacccttcgtggatgtcgcggtttgggaacgccgcgcgccaagcgaaacggtatcgggacggcagaatctttcttgcgggtgatgccgcgcatattcattttccggcgggcgggcaaggactgaatgtcggccttcaggatgcaatgaacctcgggtggaaactggcggcggccatcaaaggctctgcgccttcttggcttttggacagctaccatgatgagcggcatccggcagcggaagggctcctcagaaacacggaggcacagacaaagctgatcgatttcactcaagcaggcctccatttgcgaagcatgatgtcggagctgctggccttccctgatgtgaatcgatatgtagcggggcaaatttctgcgctcgatgtcagatatgaagctgatcgtaccatgccgccgaatcgtttgaacggggcaaggctccctgacatgaagctgattctttccgacggcaattcggaacggctgtacagctttctccaaaacgggacattcgttttgctgtcattgaggcaggaagctgatgatcatatcgaagtaaaaggcttacgtacggtaaccgcctcgcttgcagaaccgaatgaaaagttgcggaatgtgcataccatattgattcgtcccgatggacatgtagcctgggcggtggatgcatcagcgcccgattgttccgaggtgattcaaaaagggatcagccgctggttttccgtcaccagccgagtataattcaattcgattgtttcatctgtaacaaaacggtatgatagaagaaacaatcgaatgaaaaaggatggaaaacccgatgaacacagatcatacgaaacgcaatctttttgaattgtatgcggagctcattcatcagcaggagaaatgggaggggcttattaaagcctttttatctgacgaattgaggaagctggatgtagagcacgggagtaaatctcaattgacgatgacagaaattcatgttctatcctgtgtcggggacaatgaaccaattaatgtcacgtcgatagcagaaaaaatgaatacgacaaaagcgactgtatcacgcatcagcacaaaattgctcggcgcaggcttccttcacagaacacagctcagcgataataaaaaggaggtctacttccgattgacgcctgctggaaaaaagctgcacagtttgcacaaatattatcatcagaaggctgaacagcgttttctgtcattttttgaccgctataccgaggaagagattctttttgcggaacggctgtttcgggatctggtgacaaaatggtatccgtcgtcagaagaaattgaaggggggcttcctagcatttttaaataaaaaacacgcactgcggtgcgtgtttttcgctttgtttctatctttttcaaggctgtaacgtaaatcagatttcctcttgaagaatgaaattcaagatgttcaggaatttgcactgcttatacgatatgtctattagtatctttattttatacgttttctactgtgtttttgatgctttgttttcaagtgaaatagggtcttctgttttagttctcctaatctttacagaaatacctactagaatgaccgccatagttgtaaatattcccatggttaataagatcgtatcctggtttaaactccatccaattaagaaagagatgatcgctcctccgaaacttgccgaggcaataaataaacttgtaacttcgtcaacgtacttctgaataatgattgatgctagtgttaaagcaatgggaaatatccccgctatacttaggccaatcaaaaatgtaccactcaattgaagtattgggttacttatataagagaaggcaatcaacaaaacaattaaacaactacagctaaaaagaaggtatttggaaaaatcaagccttctacttacgaaaccaatcaatattcttcctatgatgatccctacccagaaaaaggagacacttataagactaatttgttcattgtcttggtttatcatgattgaaggtaaaaagttggcaaaatttgtttcaattccagcatataggaaagcgaaaaatacaaaaaagcctaattgctttgatttttttctatctcctataaagtattgaaatgctcctccatctggaaaggtcacttgttggttagcattcttagcgtactctcggttcttagacaagaaaattaaccaccctacgaataggacgaataaaaaggtgaatatacagtaatatggtaaaaaccagttattgatatctatgaaggaattaattaataatgggaaagataaagcgcctaatccaaagagaacttccagcttactcattttttctgcattactttcgaaattagcaataacaaatgaaccaactgtcgtttctaatgtgcctgctccatatcctaagagaaaagccattacaataatataataccaatccttggttagaaaaaagatacttaacgctacaagcattattgtcaaagctaaagtaagtgtcctaaaatgactgtatttcttaatcattaaaggtgcgattaatactccgcttagaaatccggtaaactggaagaagattatgaccgaaatatcatctgttgtcttgttaaaagcctctaataaaaatggtgtcaaactccctgttgatatatggataatacctactgtaaaaaagaaagcatatccaaataaatatgtccctcttaacattcattacacccctatatgaaaaagcaggaaagtaaattcctgcttttttagtaacttctctctttgaaatactagttgactgctgaaacagacatgggttgagagttgctgtctttctcaaagaacatttctaatacttcctgagatctaaaaccatcactaaaagaagggatctcaacccaatcattctgagttgatgcaatccaattgattaactcgcttctaaaagaatcagcccatccataaaactcgtttggcggatcgtttaataggctttgcggtactgggcagtctaccacgttcaagccatctatgagcttgtaaacgtgaggattacctgtgtggtatttaaactcttttttgtgtccaactacctcaatgctaaaaccacagtcttcaggtacagaacactttgatgtgatgatatttacaaataccttgttcttcagctggccataaatttctgcatagtcatctacaagtacctgtttatcctcttttgtttttacatttgtgttcatctttgcccttactgattctgtgatgaaatcactctcgaacaaataccataccatgtcaataaggtgaatacccagatcccccaatgatccactcgtcttcttactattagcgtcatctctccaagtaaacttcttacgtctaagtgcactatttttcttgaagtgtacttttatggacagtatgttacctagttcattattgataattaagctttttaagatatttacgtaagataaatatctataattaaatcccatactggctcttacgctcaacctttcagcagtatctttcattatgcttgcttcttcaagagaaatagccataggcttttcacataatacatgcttatgttttcctaatgcttgcaaagcatgttctttatggcaaaagtttggtgatgctacaattaaaccttctgaggcatcaattagttcatctacgttttcaaatgacttcccgccgaaagttttcacaaagctttccgcattttgttgatttatgtcatatacccctactaactctgcattttttattgtagataaagcagttgcatgcgctcttgcaataccacctgcacctatgatgcctatcttcttcatttttatttcctcctcatgatccaattaatttttttaaggtattagtaattccttttgagtactcactatcagttataaggttgtgcaagtttttggcttcctgtgttgcattttttagcagatatccattccctactgtctgtaacatacgaacatcatttccactatccccaaatgcgatagctctttcggtatttaggttgtatttctctaacataaacgttacaatttcattctttcctgtccctatggggataaaatctacatcatagctgtcttctggatcgcctgctaagggattacaccgatttatatttactgaaacgccgtattcttcgcagattttttcaatagctaataggtttttcttgtcgtttatttcatcttgttcctgatagtagaagttatgcttataccgtgactttcctaattgggtttgaggattcaaaagaatgttatgattttcatgcagctgtttcacaagtttttcaaccttttctttactaaacccttcatttatgcgactgttccacttgttatcttgctgaccgaagttatgctctgaaaagtacgtaatttcagttccaagatcactagctataaaatgcggaaaatatctaaattttcctcgtcccattttatcgagaatagattctatactgctcccagtaacccatccgattattagctccccatctttacttttttgttctagatagtcttcgagttcatagatgtcttgttgcttttgttcgtcgattgtatgcggaaaatacgtttcatcaaaatcacaaaaaacaatatattgaggatgttcaaccgtggataacgttttatactccgatttcttgcttaataacatgaaacagtccctccattactctgtcttgttcttctaaagtaaatgacggatataaaggcaaatgcagtacctgactatgagccttttccgtatgaaccaattggagtcctgcatacttgtcctgtactaaaggagttttttgcatatgagaaagtattggataatatacatctgtttgaacaccaaaatcttcatttaatttagtcatgatatctgccctatcttctgttcttaccttaataggaaacagatgccatacatgatcttcacttaattctggtaattcaatatagcctttattctgcaactctgctaattgggtaatgtatctatccgccaagaacaatcttttgaagttgtttaatgaaaggtacttcattctctctaaaccaattgctgcctgtaaattgtccatttttgaattaaatccaaaattgatgactttcttattttttacatttacttcaaaaccgtgataactaaattgaatgcattttttagcgagttcttcattatcagttgctattgccccagccttgccacatacaccaaaattcttatagggattaaaacttaatgtagtgatgtctgcatactttcctaagtctgtcagtccaattccttggcaggcatcttcaattacttttaatttataacgatttgcgatttgacggatatgctgcatgtctgaatgttttccgtataaatgcacaggtagaataaactttgtataaggagttattgcttcttcaattttgtcaggatcgatgcagaatgtttgtgggttaatatctacatagataggaacgcctcccgaagctaacacagcattttcagtagctgaaaagctattagccggcatgataacttcatcccctgggtttaaccctaaagccaataaacctatcataatagcatcggttccactgctggttgcaattacataccttttatgtaaatatgtagataaaactttttcgaattgctctaaatagggaccactcgtaaattttccagttggcaaaacttcagttaatgtatttaagatatcttccacttcatcattggttattaatctgtctacaggcaaaaaagggactttactgatttcacgatttttttgatagttgaaaaggtcatgttcaatatctatcttttcttttaatacttgtttccaccgctcgtttacaatactgtcttcaataacaagttcttttccttgtacgtcaccttttaagtgttttaatagtgacatgttttctttgcttttacctgaaatcttaacctgtttttgcatgaacagtacctccaatgattttataatctaaaaatttattacaaatttatcctagtttctgaaatcggtaacatgtcaacaacttttttaaggaagggaaaatatgcctacaattgatgaaatagcaaaattatgcaatgtgtctaaaaccacagtgtcaagagtattgaataatcatccttatgtgtcgaaagaaaaaagagatatgatcttaaaggctattaacgaacttgactacactcccaattatttagctcggaattttaggagaaataagacacaaacgatagctttatcggttccgagtatcgaccatccattttttgctcaattaataaaaggggtctctcatgaagtactgtttaagaattacaaggtaattgtatttcagaccttttatgacaaacagacggagctagaattactagagttattgaagcataaagaagtggatggcattattcttgggactttagaaaatgaatgggatcagatatcccctttcttaaagtatggtcctatcttattatgtaatgaatatcatcactcagcggacatcacgataattgggtatgatgaatttgaagccgcatacatgggggtagtacatttaattgaaagagggcataaaaaaattgggttttgttttgatactccatatagcgaagctcaatgtcagaggaaagagggttatttgaaagctttacaagattacaatttacatcatagaagcgaatggatattcggcgaaatgtttaatatcgaggatggctttcgtgtttttcataagataaaggatctaaaggacagaccctcagcaatatttacaggaaatgatcaagtcgccgcagggattattaaacaggcgatgaaaaatggctttaaagttccagaagacttagctgtaattggttttgacaaccaattgatttgccaagtcgttactccgaccataacaacaattgatatccccgtaatagaattaggccaacaggctgtgttgaaaatcatcgagtccatttcgggtaatgcctctttaaacagaagaattattaaactgccaacaaagcttattataagagaatcaacgtaacgatagatttccctttaacattttatatctttatataagaaaaagaggttattcattttaacctctttttcaatcgtaagtcgtcaattatttctttcatttcaccctctggcagcactcacttcaaatctgatccattaacaacgaaatatccgcttatatttcctcatctcgatggtttgcgaattaaaagttcttgaacccttttttcaactaggcactactgccgctgattgagctctttttgtcttttttttcaccatgaagatggtgaagcaggcgataaaacggcggcagcagggcaataaccagaatgacgcgaatgacctgaaccgcaacgacaaaggtggaatcagcatgtaaggtaactgacgtcgtcgccatctctgcaatcccgccgggcgcaaatgccagaacagaagtgatgagcgaaattcctgtcagctcggaaacgatcacggcgctcaaaaacattgctgcgattaaaccgacggacgagacaaacccgacgatgataatacgggtgacgccggcaaacatgcttttgtacatcttagagccgatcgttgccccgagaaatacttgtgatacatggttagcttgtgacaaccaccatgccgtcatgtcgtgccctgtcaccgcagctccgccaacatgtacaattgctacaccgagcatgctgccgagcagccatggagctggaaattttaaaaatttcgcagctttgcaagctccccaggcagcgagaataagaatgacggtccacaaaacgggagcgagcctaaaatctgtcgttgcagaagaaatcgtctctgctgcggcacttgcggtacgatcttgttttgtatagatcagaatgactaaaaacggaatggaaagcaccacgagcagcacacgcatcatttgaacgaggctgactatagcggtattggcgcctacttcctgtgcgatgctcggcatggcggaaagtccgccgggagcggtgccgacaaagctagtcatcatatccgttttgctgaaacgccaaagcacatatcctgacagcatggccagcaggatagacaatatcagcataacgccgactgaaaaccaatggtctttgagaacagagagaacggataaattcagcttttggcccaattcgatgccgaggatcatctgcccgagggcgagccatcgtcggttaattcctttttggtctggtgccatcatcagccatgccggccgtatcatggcgaggcagcaggcgacaatcagtgttccgatcatccatccaattgatattccggttaatgaaagaataaaccccccggctgcactgattgcgataaaccatagatctttgaggagattttcgtctttcttcaatgtaaaacccttcttcctttttcacgtaacactccaattgttcacgtagtgaatgtatttattactatagtatatttttgttgataaagaaattatgaattattttctataagcgattcacttttcttatgaccttgtgttcgagcttttctattgtgtaagtcagagataaacccgctgtcagcagacacacggcaagagcgtaaaaaatcacttctccgccaaatgatgtcaggatcagcccgcctgccagcggtccgattgagcgggatatatcccaatgcagaccatagacagcataaaaccggcccagcaaatgaggcggcgccaatttcgatatgaaggtctggatgtgggttagcccgatgctttcaccaaccgtcatcaccgctgccgtcactaaaagcattgtcagagaggttgagcatgcaaagccggctgccgcaagggagtagcaaatataagtaatgaagaggatcgttttcattgaaagcttttcggtccctttgacaagaggtacttggagaacacagctgaataaagcttttgctgctgaatagatggtcagcatggacagataatcagaaaacatgtttttgctgaacagcctgtatgttgtttctgtttgtgcatataacatgctgatggggagagaaagcagcaaaagaagcaggacaggcctgtatattgtaaagctcgcggacattttcggggtaacagctgggtgtagcggctttgtctcaggcagtttcagtgcagcgatcagaaagtagataaacaatgctgcagcatctaatgcgaatatccacacggggttatgattgtacagcagcatccccactagcggtcctgccgtcagacccgtcgaatagatcgcattgatgaccgcaaacacttccgaacgtctgctttccggcgtgctttcagcgatttgggcgcgggaagcgggaatgtacaacgatcttccgatgccattcatgacatagagaatagcgaaaacatacgcatgctcagcaaatacaaaccctgtcattgccgctgattgaagaagcaatgcggtcaaaatcgctgtgcgccgcccaagccgatccgtcacccgtcctgcagcgagcgtcaggaaaatatcagcaaatggctgaaggctgatgatcagcattggcatcatgatactgccgtttaattgttcatgcagatacagcaccataaaaggtcccatcattgcacctgtcaggcttgtcagcaattcgccgaaaaagcggagccgaacgggagcggtatatctcgattttatagagtgaaaactggtcaacatgtgatcgccgcctttcgctgtttgatatagtagtagtgtatagaaggggcggcggcccaaaaagtgaagaaaagaagagataaaagttccccttttgtcgggaggtgcggggattgaagctgatagagcactacgtggcgcttgtaaaaacaggctgcgccgagtatgggcaaatgaacgaaatgacgctcactgagattgccgactgtttattttgtacagaaagaaatgcaaagctcattttacataagctggagaacagcaattggattatccgggaaagcggggcggggcgcggccgcaaatctaaaatcgcgtttcttcggaggcctgaggaactgcttcttcaaactgcaaaggaatataccatgtcaggaaagcttaaaaaggcaaaggagctgcttcagcagtatcagtccgcgtttccagggcttcaaaacgaatataacatgtggctatcagaggtattcggatttgtgacggagacaggcgagaatggggcgaaggatgtcctgcggctgttcatcacgcctgaatctgtcagcagtttggatccatgccaaatatttttgcggtctgagggccatttcgtcaaacagatatttgatacactcttcacgtttgattcggatatgcaggagccgaagcctcatttggttcatggatgggaagaggtcggaaaaaaacaatggagattttttcttcgaaaaggtgtgttatttcataatggacagccgctgacatcgcgggacgttgcgtttacatttcagcgctttttggaactggctgacaacccgtataaatggcttctgcacggagtgaaacaagtcttagaaaagggcccttattgtgtggagctcatactcgataagccgaatgcgcttttgccgtatgctctttgtgatgaacggctgtccatactgccggcagaacagggcggcgggaaaaatggaacagggccttttcagatgaatcagcaacatagcgggatgcttgtgcttgaagccaatgagcgctacttcaagggacgcccctatttggatcgcgttgagtttgtgttttctgagcaagccggagagatgaacggttttaccattcaagaaaaacaaacatgtcctgagcagcaaactgtctttgatgagcggcatgttcagtatttgtcgcttaatctgaaaaagaaggggcctcttcagcaccgaagctttagaaaagcgctccggctgctgatttcctctgaacggctcgttcgtgaagcgggagggcaccgaagaattccggttacgtcctttttgcatccgagtccttttgagtgggagggcgtttcgccatctgaattgttgaaaaaaagcggatacgagggcgaaacaatcgtgctttataccttttcggaaacggatcatcgtgaggacgccgaatggattcaaaatatttgcgcccagcacggtatcaggcttacacttcaattctgtgatgctgctgatctgcgacggccggaaatcgtgcagatggcggatatcattcatgacagtgcgacgttttatcaagacagcgagtttggttttctgcatttgctgctgtcggagaacagtttcttgtatcagcatctatctgaaaagctgacacagatttgctcaggaatgacagagcggatgttttccatgcctgaccgctgttcgagaatcaacatcctgcgtgacattgaccggcagatgatacaggagctgaacgcgatcccgctgtatcaaaatgtgctccaggtgacatcaagtaaaaatgtaaaaggcctggtgcttgatgaagagggatggattgatttgtactccgtatggctgtccaaataaaaagagggttcttttttgaaccctcttttttacgctgccatgctgcggcattgttcagcacaggtgaagcaggctttcgcacatgcttggcaatgatcatgatcgtgctttccgcattcagtgccgcatgcttcacaaatatcggcgcaaagtgcacaaatttctttcataaacgggctgtccgtttgcatggctttgaccgccagcgcgcaaatatccgcgcattccctgtcaagccggatgcatccgctgagatgatgctgcacgctttcttccaagcatttagtgaaacaatgattgcaagccttcatgcaatcgatgcaagcctcaatacaagcctcagaatattgctccatggttgattccccctgtatgacagtatatggttttatgtttcacggctgcatttgaaaaaaacaggggagtgtgtttttagctaaggggatatgtacatataccctgaatgggtatatctaacgttccatcagatagtataggaaccagacagcgtgattttgttcatcacgtgctgcgcgcgtaaagacgcctttcgcttttaagtttgacgtttcctcggccgcacgcaagtaaaagtcgacggtttcttgttcatctttaaaagcggcgtccagtcctcttgtgaaattgtccgggcattcttccgtttgtttcggcatgatgtgtttgccggtaattgaaccatacagtgtggaaaattcacggaggtggcgaatctcgtcacgcctgatttcttcaatctgttttctgacctcatcgctgtgggcgagttcggcaagcttgcggtagcattgaatagcactgaattctccgttgatggccttctgcaaattccgaatcaaaacaggatcttcccggtatggcaccggatagggatagtagctgtaatgcaaggggattcaactccattcttaggaattgggcttctgtaaaagtatatgttgggcagggagagatgtgcggagataatcagctttttatatgtgaaaaggccgtttttaccaatagatcagattggtcattttcgtcaacattcgataaaatatagagagataaaaagagaggggtcttctaatttgggagcagagtttttagtaggcaggtccgggagtggaaaaacgaagctgatcatcaacagcattcaggatgaattgcgccgggctccattcgggaagccgatcatttttctagtcccggatcaaatgacgtttttaatggaatacgagcttgctaaaacgccagatatgggcgggatgatacgcgctcaagtgttcagtttttcacgattggcctggcgcgtcctccagcatacgggaggaatgagcaggccgtttctgacgagcaccggcgtacaaatgctcctgcggaagctcattgaggagcataaacaggagttcaaagtctatcaaaaagcgagtgacaaaagcgggtttaccgcacaggttgagcggatgctgacagagtttaagcgctattgtctggaaccggaggatatccgccggatggcggaaagcggaacggcttccgagtatcgcggagaacgtgttttatctgaaaagctccatgacttatcaattctgtatcagcaaatggaaaaaagcctcgcagatcaatatcttcactctgaggattatttgacattgctggcagagcatatcccgcttgcggaagatataaaaggcgcccatatctatgtggatggcttttatcagtttaccccgcaggaattcagggtgttggagcagcttatggttcatgcggagcatatcacgttttcgctcacagcggacaagccgtcatatgagcgggagccgcatgaactggaattgttcagaatgacggggaaaacctattaccgcctgcatcagaaggcgaaggaactgaatttggacattacgtataaagagctgagcgggactgagcggcatacaaagacgccggaattggcgcatctagaggcacagtatgaagcgcgtccggccattccatacgcagaaaaacaagaagcccttactgtgatgcaggccgcaaacagacgagctgagctggaaggcattgctcgggaaattcacgccctagtcagagagaagggatatcgctataaggatgtagcaattcttgcgcgccagccggaagactacaaggatatggtgaaggaagttttcgcagattacgagattccttatttcattgacggaaaagcatctatgctgaaccatccgttaattgaatttatccggtcgagccttgatgttctgaaagggaattggcgttatgaagcggtgtttcgctgcgtgaaaaccgaactgctattcccgctcaatgaaccgaaggccaaagtgagagaacaggtcgatcagctcgaaaattactgtatcgcctatggtattaaaggcgaccgctggacaaagggcgatcggttccaatacaggcgttttgtgtcattggatgatgattttgcgcagactgatcaggaaatcgaaatggaaaacatgttgaatgacacccgcgattggattgttccgccgctttttcagcttcaaaaacgcatgaaaaaagcgaagacggttcaagagaaggcggaggcgctctatcgttatttagaagagacggatgtgccgctgaagctggatcaggaaaggcagcgtgctgaggatgacggcagaatcattgaagcgcagcagcatcagcaggcgtgggacgcagtcattcagctgcttgaggagtttgttgaaatgatgggagatgatgagatttctcttgatttgtttcagcaaatgatagaagccggcgcggagtcgcttacattttctctaattccgcctgcgcttgaccaggtgtttgtcggcaatatggatttgtccagaatgtatggcacctcctgcacctttgtgctcggggcaaacgacggcgttctgccggcacgccctgatgaaaacggggtcctgtcggatgatgaccgggaatggctgaaaacgattggggttgagctatcctcaggcggacgagagcgtttgcttgatgagcacttcctcatctacatggcgttttcaagtccgtctgaccggctttacgtatcgtatccgattgctgatgcggaaggaaaaacgcttttgccgtcgatgatcgttaagcggctggaagaactgtttccgcatcataaggagcgcctgttaacaaatgaacctgaacaggtcagcgatgaggaacagctgatgtatgttgtgaataaaagcgtggcacagtcctttaccgcgagccagctcaggttatggactcgggaatacgacatcagcgacgtctggtggagcacgtacaatgtgctgatgagtgagcaggacaggctgcaatcgaaaaagctgttctcaagcctgtttttccggaatgaagtgaagcagcttgaacgcagcgtgtcgagacagctctatggtgaacgtattcagggcagtgtatcgagaatggaaacctttaacgcatgcccgttttcccattttgcgtcacacgggctgcatttgaaggaacggcaattcttcaagcttgaagcaccggatatcggccagctgtttcattccagcttaaagctgatttcggacaggctgcgtgagcaaaagctggattggcgcgatttaacgaaggagcagtgcgagctgttttcctatgatgcggtagagcggctggcaccgaaactgcaaaaggaaattctgctcagctcaaaccggcattattatgtgaaggaaaaactgcaaaaaattgtgacacgtgtgtccggcattttaagcgagcatgcgaaagcgagcggattcgtaccgatcgggcttgaactgggctttggaggaaaagggccgcttccgccgctgacctttcaactgaaaaacggctgtacgatggaactcgtcgggcgaattgaccgtgttgataaggctgaaagctcaaaaggcctgctcctcaggattgtcgattataaatcaagcgacaaaggccttgacttagcggaagtatattacggattggcactgcaaatgctgacgtaccttgatttatcgattacacattcagctgactggctcgggatgagggcgacgcctgccggagtgctgtatttccatattcatgacccgatgattcaatctaatctcccgcttgggcttgacgagattgaacaggagatctttaagaaatttaaaatgaagggcttgctcctcggtgatcaggaagtggttcgcctcatggatacaacccttcaagagggacgttcaaatatcataaacgccggcttgaaaaaagacggctctctcagatcagactcagcagcagtcggtgaaaaggaatttgatcttttgacaaagcatgtgcgccgcaccttccaagaagcgggcgaacaaatcaccgacgggcgcgtatccattgagccgtacaaaatgaagaacaagacgccgtgcacatactgtgcgttcaaatcagtatgccaatttgatgaatcactggaagaaaacgagtatcgcccattaaaggctgaaaaggacaagacaatacttgagtggataaaaaaggaggcggatggcaatgaacattcctaaaccggcagacagcacatggacagatgaccaatggaatgccattgtttcaaccggccaggatattcttgtggcagcggctgcgggctctggtaaaaccgctgtgctcgttgaacgaatgattcggaaaatcaccgcggaggaaaacccaatagatgtagaccgtcttctcgttgtgacatttacaaacgcctcagcggcagagatgaagcaccgaatcgcagaagccttggaaaaagagcttgtacagcgccccggctcgctgcatattagacgccagctgtctcttttaaaccgggccagcatttcgacgctccattccttttgcctgcaagtgctgaagaaatattactacttgatcgatcttgatccgggctttcggatagctgatcagacggaaggcgagctgatcggggatgaagtgcttgacgagctgtttgaagacgaatacgcaaagggcgaaaaggcgttttttgagcttgttgaccgctatacgacagaccggcatgatctggatctgcaatttctcgttaaacaggtgtacgagtattcccgatcccatcccaacccggaggcgtggctggaaagctttgttcatttgtatgatgtatcagaaaagagcgccatcgaggagctgccgttttatcaatatgtcaaagaagatattgcaatggtgcttaacggggcgaaggaaaagctcttgcgcgcgcttgagctgacgaaagcgccgggcggcccggcgccgcgtgctgacaattttcttgatgatcttgctcagattgatgaactgattcagcatcaggacgatttcagtgaactatataagcgggtgcccgccgtctcttttaagcgtgccaaagcagtaaaaggggatgagttcgatccagcgctccttgatgaggcgacagatttgaggaacggcgcaaaaaaactgcttgaaaagctcaaaaccgactacttcacgcgaagtcctgaacagcacttgaaaagcctagccgagatgaagcctgtcattgaaacgctcgtacagcttgtcatcagctatggaaaacgattcgaagctgcgaaacaggaaaaatcaatcatcgatttttcggatttggagcattactgtttagcgattttgacagctgagaatgacaaaggtgaacgtgagccgagcgaggctgcaaggttttatcaggaacagtttcatgaggtgctcgttgacgaatatcaggataccaacctcgtgcaggaatcgattctgcagctcgtcacaagcggtccggaggagactggtaacctgtttatggtaggagatgtcaaacagtcgatttatcgattcaggcttgcggagccgcttcttttcctctctaaatacaaacggtttacagagagcggagaaggcacggggcggaaaatcgatttaaataaaaatttccgaagccgggctgatattttagacagcacaaactttttatttaaacagctgatgggcggcaaaatcggtgaggtcgattatgacgagcaggctgagctgaagcttggtgcagcgtatccggacaatgacgagacggaaacagagctgctgctgatcgacaacgcagaagatacggatgcaagcgaggaagcagaagagcttgaaacggtgcagtttgaggcaaaagccatcgctaaggaaattcgtaagctgatttcatcgccgtttaaggtgtatgacggaaaaaagaaaacacatcgcaatattcaataccgagatatcgtgattttgctccgttcgatgccgtgggctccgcaaatcatggaggagctgagagcacagggcataccggtttacgccaatttaacgtcaggctattttgaagcggtcgaagtcgccgtcgcgctttctgtgctgaaggtgattgataatccgtatcaggatataccgcttgcctctgtgctgcgctcaccgattgtcggagcagatgaaaacgagctgtctttgatccggcttgaaaataaaaaagcgccgtactatgaggcgatgaaagactacctggctgctggtgaccggagcgatgagctttatcaaaagttaaatacgttttacggacatctgcaaaaatggcgcgcgttttcgaaaaaccactcagtatctgagctgatttgggaagtgtaccgcgacaccaaatatatggattatgtcggcggcatgccgggcggaaaacagcgccaggccaatttgcgtgttctttatgacagggcgcgtcaatatgaatcaacggcatttcgcggcttgttccgtttcctgcggtttatcgaacgcatgcaggagcggggcgatgatcttggtacggcgagagcgctcagcgagcaggaggatgttgtccgcttaatgacgatccacagcagcaaagggctcgaatttccagtcgtgtttgtagcaggtctcggccggaatttcaacatgatggatttgaacaaatcgtacctgctggataaggagctcggatttggcacgaagtatattcatccgcaattacgcatcagctatccgacacttccgctcattgcgatgaagaaaaaaatgcgcagggagctgctgtcagaggaattgcgtgtgctctatgttgcattaacgagagcgaaggaaaagctgtttctgattggctcatgtaaggatcatcagaaacagcttgcaaaatggcaggcatccgcgtcccaaactgattggcttctgccggaatttgaccgctatcaggcgagaacgtatctagatttcattgggccggctcttgccaggcacagagacttgggggatttggctggtgtgccagcacacgctgacatctcaggtcacccggctcgttttgccgttcaaatgatccattcctatgatttgcttgatgatgatctggaagaaagaatggaagaaaaaagcgagcgcctagaagcgatccgccgaggtgaaccagttcccggctcgtttgcgtttgatgaaaaagcccgcgagcagctgagctggacctacccgcatcaagaagtgacgcaaattcggacaaagcaatcagtttctgagatcaagagaaaaagagagtacgaggatgaatacagcggcagggcccctgtaaaaccggctgatggaagcattctgtacagacgtcccgcttttatgatgaaaaaaggcctgacagcggcagagaaagggactgccatgcatacggttatgcagcatatcccgctgtcacatgtgccgtcgatagaagaagctgagcagacggttcacaggctttatgaaaaagagcttctcactgaagaacaaaaagacgctattgatatagaagaaatcgtgcaatttttccatacagaaatcggcggacagctgatcggtgctaagtggaaggaccgggaaataccattcagcttagcgcttccggccaaggagatctatcctgatgcacacgaggcagatgagccgcttttagtgcagggtattattgactgtctctatgaaactgaggacggattatatctattggattataagtcggaccggattgagggcaaattccagcatggatttgaaggagcggccccgatcttgaagaaacgatatgaaacgcaaattcagctgtacacgaaggcagtggagcaaattgcaaaaacaaaggtaaagggatgtgcgctttatttctttgacggagggcacattctgacattatagcgagatccataagctccggaatttcaggcggagcgggtctcgttttctatataaaagagaggtgaaagcatttgcggattttacatacggctgactggcatcttggaaaaacgcttgaaggaagaagcaggctgagtgaacaggccgatgtgctggatgaactgaatacgattgtaaaggatgagcagatcgatgccattgtaatggcgggggatgcatttgacaccgtaaacccgccagctttagccgagcagctgttttatgaaagcctgtctgcgcttagcgacagaggaaagcgcccgatcgtcgtcattgccggaaatcacgataatcctgaccgtttgtccgccgcttcaccgctgacacatgaaaacggcattcatttaatcggttatccgacaacagagccgattcatattgaagtgccttcagcaggagagcttttggcggttggagcgctggcgtacccatctgaagcgcggttaaatgaagtgctatccgatacgtttgatgaaaagctgctccgtgatcactatgatgtgaaaatcaggcaggcgtttgagcatatgacaagccggttccggaccgatgcagtgaagattgccgccagccatatttatgtggcaggcggaaaccaaaccgattcagagcggccgattgaagtcggcggtgcatacacggtggctgctgaaagcctgccggcagatgccgcttacgttgcgctcggccatttgcatcgcccgcaaacgatcaagcgggcgcggacgcttgcgcgttattcaggatctccgctcgcctacagcttttctgaagcgggctacgctaaatcagtgacgattgtggacgcaaagcctggggaagaggccacttggcaagaggtgttattatcaagcggcaagccacttgtgaagtggaaagcggcaaatggattaagtgaggtgtacagctggctggatgaaggcagagatcagaatgcttggattgacttggaaatccgtgtcgcggaccagctgtcacttgaagagattcacaggctgcggaaggcgcacccgggctttatccatatcaggccggtttttgaagaacagaacaaagaccgggaacggatcgaggttaaacatgtctcaatcgaggaccgctttaagaaattttatgaaaaacaaactggcggtgcggtgccggatgaagaaatggtgaagctgtttttagagcttgcatcaggcgttgaagaggaggatgcgaaatgaagccgatcgccttaagcattaaggggctccacagctttagagaggagcagacgatagattttgaaggcctttccggtgccggtgttttcggcattttcggcccgacaggaagcggtaaatcctctatactcgacgcaatgacgcttgctttatacggaaaggtggaacgggcggcgaataatacgcacggaatcttaaatcacgccgaagatacgctgtctgtgtcctttacctttgcgcttcagacgaatcaccaaatctcatacaaagtcgagcgtgtgtttaagagaacggatgaaatgaaggtaaaaacggcactttgccgcttcatcgaaatcaaggacgagcatacggtgctggctgataaagccagcgaagtgaataaaagagtggaggagctcttagggctgacgatcgacgattttacgagagcggtggtgctgccccaagggaaatttgctgaatttctgtctttaaaaggggcagagcgcaggcatatgcttcagcgtttatttaatttggagcaatatggagacaggcttgtgaaaaagctgagacggcaggcgcaggaagccaatgcgagaaaaaatgaaatgcttgctgaacagtccggtctcggtgaggcgagctcagaggcagtggagcaggctgaaaaggttctcgaacaagctgaagcccggctggaagcgatgaggaagaaccgtgatcaggcgaaggagcggtttacagagcatcaggagatatggaatgtccaaaaggaaaaatccacttatgaagaagaggaaaaacgtctcgcagaagaacagccgcatatagacagcatgcaaaaacgcctgctggaagcagaaacagcagcagcccttaagccctatgcggaccggtacgcagaagcgatccagcatgaggagcaagctgaaaaggaacaaacgctagcccaaaaggatttagcagaccggacagctttctttcagcaaaaacatgaagagtatgaagcgtggcgccagcataaaagcgagaaagagcctgagcttttagccaaacaggaacagctttcacgcttgcaggaaatcgaaatcaaactgagtgaggccaagcaagaggaagagcgcaaaaaggctgacctccggcagaaagaagaggctcttcaatctgtcatgaatgaattagagaccgtaacagaccgcctgacacgagggcaaaacagacagacagaattgaagcagcagctcaaatccctgcaggtgacatccgatgagcgaaaaagctgccagcaggccgcagagatggcattgcgcatcagacaaaccgaggaacaaatcaaaaaagagaaaaaacgaagtgaagaattgaacctcgtgctgcagaagatgaatgaagagaagaatacactcgttcaaaagacggaagcggaagaaaacaacatcattcaggcatatgaggcagttcaaactgtgtaccatttggtgtgcgaaacggaacgctcattaacacgtatgacggaagaggctagaaagagtcaacacacgcttcacttacagcgtgaaaaagcaagggtggcactgctgacaaaagagttagcccaaaagctgactgccggaaagccttgcccggtatgcggttcaaccgatcatgatccatctgcctcggtacatgaaacgtatgaagccgacagccatcttgaagaggacatcaaacggacagatgtgttattgacggaagctgcagctctcagccaggagattctttcagccaaaattatgcttgaagaacagtccgcgcgctttattgaacagtgtccgtttttgcagacaattcaagcacagaaccttgaagcggcagcttccttcgaacatcagccggtgtatgaagcatttgaaactgccaaatttgaatggaaacgaatcaagcaggacattctttctgttaagacacgaatggcacaaatgattggcgcctatcaggagtctttaaaaaaggccgagcagcttaatgaaaaaatcggttttgaaaaaagagaagccgaccgtattgaaagcatcatcagtgagcttcaatcctcaatggacagcagtctgaacatgtttaaagaagcatttcagaatcaatctgtggacgaagcagaaaaatggcagcaagccattgaagaaaaggaccgggctgcagaagaatgtgaaaaacgaattgagaagagtatcgcgtttcttgctgagcatgaagcacaaaaggaaaaactgcgggaatcgggacaccggcttgagcgggaaaagctggagcttcattatgcggctgaacgcatcaagagcgtgatagctgattatgagcacgaactcggagattatgcaaaaggagattcgattcaaatcaaactccgctctgtccagcaggatctaaagctgttaaaggaaaaagaacaatctttatatgaagaactgcaaagcgcccaaatgaagctcaaccaagcgaaaagccgcgcttctgcaagcgagctcactcttcaagaggcgaagggcagattggaaaaagcaaaagctgcttggcttgagcatacaaaaaacacctccattacccggactgaggaggttgaacaaagtctcatcccagctgatgaacttgaaaagatgaaaaccggcatagaccagtttatggataaactgaagcaaaatgctgcaaacttaaaacgagtagcagagatacttgccggcagagcattatcagagagcgaatggaacgaaaccgttgcagcattacaagaagctgaggacgcatttggcgctgctatagaggaaaaaggcgcggccgcaaaagcactggctgtcattcgcgaccatcataaacggtttaatgaaattgaagctgaactgaaaaaatggcagatgcatatcgacaggctggacaagctgcaagctgtgtttaaaggcaataccttcgtcgaatttttagctgaggagcagcttgaaagcgttgcgagggacgcctcagcaagactcagtatgctgacaagacagcgctatgccatcgaagtagattctgagggcggcttcgtgatgcgggatgacgcgaatggaggcgtacgacgcccggtttccagtttgtctggaggagagaccttcctcacctcgctttcacttgctcttgcgctgtctgcgcagattcagcttcggggggaatacccgctgcagttctttttcttagatgaaggcttcggcacactggatcaagatctgcttgatacggttgtaacggccttggaaaaacttcagtcagacaacctggctgtcggtgtcatcagccatgtgcaggaactgcgtgcacggcttccgaaaaagctgatcgtccatccggctgaaccgagcggccgcggtacgcgggtatcacttgagttgatgtaagggaggagcggatatggcaaagcagattgccggaatatgtgagctgtgcggccggagcgatgtccagctgacagagcatcatcttacaccgaaagaggaaggcggaacgtttttgccgacagcgatgctctgtattccttgtcataaacagattcatgccttatataccaatcaagagctcgctgtacgtttaaatggaatggctgaactcagaagcgatccagagcttgcccggtttgtcaaatggatcagaaaacagccgcctgagaagctgatcaaaactaagaaatcaaatgaacgaaaaaagaaaaaatgactaaaaagcagccctctctttgcagagcggctgcttttatccgtttccaaccatatcctgatcgttgacatcggggtctatataatttgtcgcgttgactgcattatttaatagaaggaaatctcccgtgtttcctgctcccgaaccgagcgcagattttgaagagcttttcggagaaaggtaaaaggaatcaccaaagtttacgactccgcccgatatggaattgatagctataggcccgacaattgctggcataaacgacaccctttatcgaagtctctgtttattatatgttcttggcgggcgattgtgagcgcggagactgaatctgtctgatatgtttgagtctcgcatcaccgcgaataagcgaagctgatccggcatgtaaaacagaagaggctgagaccccttgaattttgatgctgcgaacataaatagccggcacctcgtggcaaaacgcgctttgtacacctgtttcggggagcggcttcacggcctgctgctgaaagatctgatactcctttttgttaaatgagccttcattatggtaaaacgtggacagagaacgctgcacagcaaatacttttacactcatatcgatttcatttgtgtcgccaacttgaaacacacttgcgatcccgagagaattaaacttaactagtctgatgcgcgatatgcgtttaagcattattctggcgcaagcggagcaaacggcccaataataagagattcaggcggtgtatcaaaaatagaagacaggtagatggattcagtgtctccgatgtggaaaacggaggaactggacacaccgttcatccgaatatccccgacttccaagctgcggttgatgactgtaaagatcatgcttgctcatctcctttcatttctgatggaatatgctccagaaagtgttctacagcgcggatgacatcacgcttcacatgctcagcgatatgttctgcatattgtgcaggcggtgtattttcttcttttttgatatgggacatataatagtgaatcctgctgtccatttgttttctgatgtcttcaataacatgatgtctgtttgtatcgtcaagtctgctgtcatattgattttcaagctgttccaaaatatctgggatttcctcggttaagtacatgtcgacattctggcggatctgctgcatgagctgagcgctctcttcctgctgcatcatcccgatttgcggtgtcgactggctgacgtcaaagttttggacgctgttcgggtcagtcggatttaaaccgatattcaaagtcccgtcgagcctttcgattttcagctgatcaaatttatactccacacgctcaatggtagtggccggccgctgtttcatcgtattcatttcagtttgaatctctttcagctgacgttcgagctgctgaatgtgaatcgcctgctgctgaacgaaggaattcaagttttgcaggtaagaggaaacagattgatcatacatgttcttcacctctttcatatgattaacggccaggaggctggagcgggaccaatgaacctgtgtcgggctcctgcagctggagcggttgccctgagccagaaacttctggtgccggctctacatagcttcctgtattatacaaatttgacagtgacttgattgatccggcgctcccgatttgcagaatggaggagttgctgattgattccagccggagatagttgatttgaatggtttgattaatatagaagttcatgagcctcactccttttacgcattggccacgatcggctgatcaaccgcatcattgtcatacacattcgtcgcgttttgataattcatcaccttgaggctgtcgccggtattaaagctgccagcaccggcaaacgttctgacctgagcctgaggagaaatcgtaatgcagtccccgatgtgaacgactccgctcgtaccaatcgcattaattttaaacgctccgacaatggccggcatacgagcacatcctttgttgaaaaattaaaaaaagacaggtaaagtgaaatgacaattccgatttcaattgggctattcacgatagcttatgacaaacgcacatatgtgtgagagaaattttaaggggacatatcggctctttgtgaaagcgttttattttttcgggccgttatgtttaaacatggcaaaagaggatgttgggtataaattgagcggaaatgcggcgaaggatgccgctatccgcctatggtgatttttgtttatttctttggtgtttttgcgtgtagaatgctttttggagtatgtcgtgctgcggtattcgatttttgggcgggcacattctcgccctgaggtatatctcagaagtgctgagcaaaaatcggagttaaatgtggtgtattctaattgttatagaaaatgatttacatacgggagttttcaagatatctcccaaaaatcatttcttctttaatccgggtattcagcaggatatccagctcttggctgcattgaatcgtttcttttgaattcatgccgtatttttgtgcggtttcaattagtgtgatcctcatttcttcaattttactgttcattacgctatctccaattctagattttattttgatataaatacaggatatcgttagtataacctattttggctcaaaaggttgcctttcgtcaatttgactaaaaaagcgacaatttttgctgcggccttttttaatggagaaaggactaaagtcttgctaagtgtgcttgcaaaaagtcctgccgttcctcaatttctctaagtatgttggtctgctccttttcgatttgaaaggggctttttttgataaaaggatcatcagcagcactttgacaaatgtcaaggtgccattcgttgatgagaggagataatcgttcaatagtaaacgaccgcttcagcacgtttttcattaaggtgtgatattgcgacctgaaggcgggaatggatagaagccttgacgaaagcgtctttccttttgtcagaagcgggtcttcttcataccattcttgtacggcaagcgatcttgtctccatcggggaaacgtaaagccgaccggattcgtttaaacaaaatgtgtagtaaaagccttgattggtgcaggtgttgccgatcagccacaaaaaaaacagcttgacatccagatacaatttaatcctttcagccaattcgtcatctccggctgtgcggatcagtatgaaaaattcatgtaagaatgccgaggaatcattgttaaaaagggacaatggaacccttggatcggccgtcttcactccgtaactccttttaccggctggctgatggttcttgatgttcaaataaatgccttcaggctggccattgatggtcagaaagctgtacgaggcaacgggagcaggtacgccgatctggtcaaaaaaacaataggcgagtctgcgccgcatcagggacggatcatcctgttctgcattcaaaaaaagtgtcctttcaccaagcagagacttttcccagctgatttcataggatgccttttccgctctgtcacgctgtgtgagaagaatgggagaaacagatcgatctgttacgaaaagccccttggctgtacctttccttttcagctgctcccgatgaaaaaataaatgcacgcgctccatattctttcctccttctcaaaacgacatttgtatgatatgtagagcaagcccgtcctgaaacgaaatgaaaacggaattgagaaaaagggatttcagcattcgacagagaatacatgaaggagcattctgatttaaaagatgatggaggaataacatgaaatttgcgacaggggaactttacaaccgaatgtttgtcggcctgatcattgacgatgagaaaattatggatttgcagaaggctgaaaaaaaactgtttgaacttgagacgattccgggatcgctgattgaatgtatcgcagaaggggataaattcgttgcgcatgcaaggcagctggccgagtgggcaaagaaaccgaatgatgagctgggatcatttatgtattcattatctgaggtgaagctccatgcacccattccgaagccatcaaaaaatatcatctgcatcggcaaaaactaccgggatcacgcgattgaaatggggagcgaggctgatattccggagcatccgatggtatttacaaaatcgccggtaacggttacggggcatggtgatatcgtaaagagccatgaagaggttacctctcagcttgattatgagggagaacttgctgtcgtgatcggaaaaagcgggactcgcatttcaaaagaagatgcatatgaccatgttttcggatatacgattgtgaatgatatcacggcgcgtgatctgcaaaaaaggcataagcagttttttatcggaaaaagcttggatacgacatgtccgatggggcccgtgcttgtacataaatcatctattcaggagccagagcgcctcaaggttgaaacaagagtcaacggcgagctgcgccaatccggttcggcaagcgatatgatcttttccattccggaattaattgaaaccctctcaaaggggatgacgcttgaagcgggcgacattattgccaccggtacgccgtctggtgtcggcaaggggtttacgcctccaaaattcttgcggtcaggtgacaaaattgatattacaattgatccgatcggaacgctgtcaaaccaaattggctgaataaaactggagggcggacccggacccgcccgttttttctgataatcatctttgtgacagaggacaagttcatggtactataagtggggtaatttatctgatagggggaacatatatgacacacctacatattacgacatgggtggtagcgctgattctgcttttcgtcagctactcgctgtattcgtcaggaagtgcaaagggcgcaaaaatcactcatatgattctgcggttattctatatccttattattttgacaggagctgagctgtttgtccgtttcgccaactggaacggagaatacgccggcaaaatgattctgggcattatcaccatcggcctgatggaaatgctcctcatccgcaagaaaaaagaaaaatcaacaggaggcctgtgggtcggcttcgtcattgtccttttgctgacagtgctgctcggtctgcatttgccaattggttttcaattgttttaatagaaaaacctatgaacccggctctttgatagagctggttttttttatatttatcccctcatattccaaatcatttaaaataaccttaaaattccctgtaagcggtatctcgtcctatgaaattatgataccttcaaggagattcattattttgcaggagggataacatgaaacgcagaaaattcagctcggttgtggcggcagtgcttatttttgcactgattttcagccttttttctccgggaaccaaagctgcagcggccggcgcgatcgatcaggcggctgctctggaaaacggcaaagagcagacaggcgccatgaaggagccggaacaggtgaaatggtacaaagtgaccccgggagcaacggatattcagaaaaactcacatatggcactgaccgtaaagagtgattcagtactgaatgtatctgtatatccaagtaaggaaaaagcgcttaaagatgagacgtttgagatgtaccgttctttcacagcggaggatggaaaaagcgaagtcatttttccatacgcgtggagcggcccttactatgtaaaagttgaatacctcggagaagaagaaccagaggacggcggaacggcagaagcagctgcagaagccaagtatacgattgggtataaaggcaccaaaaaacagccgtcagatttagaagaggaagaagcttgtccggttgaaatgagtgtcgatcagaagaaatcaggaaaaggcatcctggataagttgagatcgattcgtgatgagcagctgagccaaacagcagaaggcaaagaactgacaagcctttattacaaagcagcaccgtttatcgttgcaaagctcgcactcaataaaacagcaagaaatgaaatctatcaggatcttgtgacattaaagccgttatttgacgatgtgtcagaaaacggagcatcatcttcgtataaggtcactgaaaaggatcaaaaagcgatcaaccggctatatgataaagctttacaatcagtcccgtcattccttaaagaggagataaagaaacaagcggaccgactaaatatgaagcagctgcaaggcaaaacagcaggagccattttaacagaaaacaatattgcagcaaaaagtgaagttcagacaacaaaggttattttcaaggtgaaggacaataaaagcctctcatccgtacataatgaaatgaagggcttttctgcaagcgcgcaatcgaaaaaagacatatctaatgtgaaaaaggcaaagaaactgtttgacaatctgtattcatttgaacttccgaaagacgagaaacagaacggcgcatatacggcaagcgccaaaagggtcaaaagcgctgctgcgacactatccaagatgtccaatgtagagtttgcggaacccgtacaggaatacaaaagcttggcaaacgatattcagtacccttatcaatggccgcttaaaaacaacggtgaaaacggcggtgtcaaaaatgcggatgtgaaatatgagcctgccaacacattgctgtccaaacgcaagcttaacgatacactcattgcagtagtagacacaggcgtagacagcacgcttgccgatttaaaaggaaaagtaagaacagatctcggacacaattttgtcggacgaaataacaatgcaatggatgatcaggggcatgggacgcatgtcgcaggcattattgcagcccaaagcgataacggctattcaatgactggattgaatgccaaagcaaaaatcatccctgtaaaagtgcttgattccgcaggttccggagatactgaacaaattgctctcggcatcaaatatgctgctgacaaaggagcaaaggtgattaatttaagtttaggcggaggctacagccgcgtgcttgaatttgctttgaagtacgcagctgacaaaaatgtcttgattgccgcagccagcgggaatgatggagaaaatgccttatcttatcctgcatcttctaaatatgtgatgtcagtcggcgcaacgaatcgcatggatatgaccgctgatttctctaactatggaaaaggtctggacatctctgctccagggtctgatatcccgagcttagtgccgaacggaaatgtcacgtacatgagcggaacgtctatggcgacgccatatgctgccgccgctgcgggactgctgtttgctcaaaatcctaagctaaaaagaacagaagttgaggatatgttgaaaaagacggcagatgatatttcctttgaaagtgtcgatggcggagaagaagagttgtatgacgattatggcgatccgattgaaattccgaagacacctggtgtagactggcattcaggctacgggcggctgaatgtcatgaaggctgtcagcgcagcagatttacagcttaaggtcaacaagctggaaagcactcaaacagctgtcagaggaagcgcgaaggaaggcacccttatcgaggtgatgaacggcaaaaagaaactcggcagcgccaaagccggaaaagacaatgcgttcaaggtgaatatcgcgactcaaaaacaggatcaagtactgtatctgaaagcaacaaaaggcgatgcgaaaacatcgtataaagttgttgtcgtcaaaggaaaaccttccggcacaccgaaagtaaacgcggtgaaaacgaaggatacggcagtaaaagggaaggcaaacagcaaagcgatgatcagagtgaaaaacaaatcaaagaaagtcattgcttctgccaaagctgacgcaaaaggaacgttttcggtgaaaatcaaaaaacaaaaagccggaacggtgctgtacgtcacggctgtggatacagataaaaaagaaagcaaggaagcaaaagttgttgttgaaaagtaaccaaaaagcggtgctcgatgcaccgcttttttatttgcgcccccgttggactgctgtgtacataatggatcgctttccgtttgaagccgtccattcaaaacggtctcctgtcccttcgctgctgtagttgtagtgatgctgcatcgcgcattgtgcggtgtcatttgaaaagtgataaaaggacacaccctgccccgccgaagtattcgaaaagactcctttattataagaaaagacgcaatcgaataccgataagccgaagctgtgcaagtgctgcagaaatgcgagaaaggtttcgtcgtcaagcgaatccaaaagcgccatgagcggccgcttgactgatttctcatagcggatgcgttctccgccggaaagggagatgttttctgcaccgcatgccaaaaccaacttgtcctgaaagccggcttgctcccactttcctttatgatggatccagattgggctgtgttggagactgtccgccagcagtatatcgccttcaccgttttcgattaagcagatgccgtcttcaatgaggatggtgccgtattcccactttcgttcctctgtatataacaattgtttccgtttcatccatgctgtctcctttttcttcattcctctcttttctttccaattcaagcctgtcccatacaactcttttatggacaaatcaactatctgcctatagatgcataaacttactaaggtgctgaaagaaacgaaattgttacgaaagaaacgggattggagctgatgtcacatgtgtggaattacgggttgggtcgattttaaaaagcagctcgtccaggaaaaacaaacgatggacagaatgacagacactctttccaaacgagggcctgatgattcaaacgtttggggggagcaccatgttttattcggacataaaagacttgcggttgttgatattgaaggcggacgccagccgatggcgtgtacctataaaggcgatacgtacaccattatttacaatggcgagctttataacacggaagatttgcgcaaagaattgcgggcgcggggccatcaattcgagcgtacgtcagataccgaggtgcttctgcacagctacatcgagtggcaggaagactgtgtcgaccatctcaatggcatattcgctttcgctgtgtgggatgaaaagcgtaatctgttgtttgccgcgagagaccgtctcggtgtaaagccgtttttttacacgaaggaaggctcttcatttctcttcgggtcggaaatcaaagcaatcctcgcgcaccctgatataaaagcgcgagtggacagaacgggactttctgaaattttcggtcttggaccgtccagaaccccgggcactggcatatttaaaggcataaaagaaatccgcccggctcacgcgctgacattttccaaagacggacttaatatttggcgttattggaatgttgaaagcgaaaaacatacggacagttttgatgacacggttgccaatgtcagatcgttatttcaggacgcggtgacgcggcagcttgtgtcggatgtgcctgtttgcacattcctatcaggcggtctggactcaagcgcgattacagcgattgcggcgggccattttgaaaaggaaggaaaagcaccgcttcatacttattcgattgattacgaagagaacgataaatattttcaagcaagcgcttttcagccgaatgatgacggaccatggattgaaaaaatgacagaggctttcggcacaacgcaccacaaatgcgtcatcagccaaaaagacctcgttgatcatttggaggaagctgtactggtcaaagacttgccgggaatggcagatgtcgactcatccctgctgtggttttgccgggaaatcaaaaaggactttgtcgtcagcctatcgggagaatgcgcggatgagattttcggcgggtacccgtggttccatacggcagatgttgagtctggctttccatggatgagatcaacggaggagcggatcaagctgctttctgactcatggcagaaaaaattgaatctgaaagaatacgtaaatgccaaatatgaagaaaccttggcagaaacgccattattagacggagaaacgggtgtggataaagcaagaagacagctgttctatttaaatatgctttggtttatgacgaaccttttggatcggaaggatcgcatgagcatgggggcgagcctggaagtgcgggtgccgttcgccgatcaccggcttgtggaatatgtttggaatattccgtgggaaatgaaaatgcatgataatcgggaaaaaggcattttgcgcaaagcgcttgagggcattttgcctgatgacattttgtatcgcaaaaaaagcccatatccgaaaacacatcatccggaatatacaaaaggcgtcagcgagtggctgaaaacgatcagaagccaaaaggactccgtgctccataccttactggacagaaaacaattagatcagcttttagaaacggaaggctcctccttcaaggtcccgtggttcgggcagctcatgaaggggcctcagctgatcgcccatcttgctcaaattcatacatggtttgaagcgtatcgcattgatattgacgagaggtaggttcaatacaaatgtgattaaaagccagagatgtatagatttaaataagaaggatagatgagcagggaaatatatgctctatctatccttttttgtacaacagcactatcgaattgcccccgcattccttcaataagaatgaataggttttaatgttctgccgataaaactagctgataccgggcttaactttaattccctagcccatacagaaagttgaccaatatggtgaatttcgtgagcgatgatatggtgtaatatttcatctcgcgtatataaaacacctgtctcccaaggaacgcttacaagttcatcttttatttgatctgaatgtgtttgtaaaacatcaattatttcagttcggaatgtatttgagagagatttcactttattgagtgtttgataatcagcgaactgaacagcgatatcttcttttccttggatagcacgaatccaactatattccacatcaataatatgaaaaagggtatataaaatattctctactccgccaagacgatttttaagtaattcttcagtggttagttgatgacaccaagtaaaccattgatctctaacctgccagttatattcaaaaaatttcatcactaaactcactccaatactatcatgtatcataacaattagcccttttttccgtgattcctctattaatgaagtgatgattgagaaatgtttacattctacctgttgtatggcattaaaaataataatgcatatctcgtcgatgatgctgtgcgtcttgttacttttacaaagtaagaatcggcattttcttcatatacaattaggaaaaaacatactagacttgaagaagcagtgatacataggagtgagaaaatgaaagagataaaagaagcttaccagcaatgcggacagattgttggcgaatacgcgccagcctgtttcaaagcattatcatatctcccgctaaagcaaagacaagcctcttgggcagtattgtcgttttgccacacggcggccagtgcagacgaaaaggtattgcccgcatttgaagctaaagctgatcatgtttaccaaaggacaaataacggtaaacaacatctatggaaggcttttgatcatgcgtatcggacctttacattggaaagcgaaccttttcgggagtttattgccgcacaaaaagaagacgccaagccgtatgatgaccttgatgaactgctcatgtacgcatatcggacgggcggtgctgccggattgatgctgctgccgatactgacacgccgaaaacaagatcagctcaaacaagcagccgtctctctcggcttggccatacagctggttcgcttcttaagtgatcttggcacagatcagcaaaaaaaccgcattccccgtcaggtaatgcagcaattcggctatacagaggctgatctccaaaaaggcaccgtaaataaagcgttcacaatgacgtgggagtatatcgcttttgaagcagaagcctaccttgaagagtgtcaggatgccttgccgctatttccgcagtattctcaaaaaacggtgaaagccgctcttcatttgcaccgggctgttttagaaaaaatccgggcgaagcagcacgatgtatttcaatatcacttcgctctcacagagaccgaagtgaagcagattctgtctgatatctaaaaaacacccggccttgattgagccgggtgttacgccatacctttttgaatccagatacgtgagcgccatcttctgtacattaagattccccggacccattcatccgcgataaaagaaatccaaatgccggcaagaccgaaaccgaggtggatgccgaaaagataagcaagcgggaggccaatgccccacattgaaatcattgccatgtaaaccgggaatttcgcatcccccgcggcccgcagagagttaatgataatgacattaaacgagcggcctggttcaaggataatggtcatggcaatcaataggcttgcagttgctataatgtcagggctttgtgtgaagagtccgatcaggtcttttgaaaagatcgtcatcaaaacagaggtagccgcagcaattccgagtgcccaatataagctcttcatgcagcgctcataagcggcatcaaattgtttgccgccgatataacggccgattaagatttgtgtaccctggctgatcgcagtgccgaacagcaaaataaacatcgtaatattttgcgtatacacttttgttgtcaacgcctgcgcgcccatgatggcgataaaatacgtgactatcatttgcgacaggttgtatgaaagctgctctcccgcagaaggaatgccgattttcagcagcttgcgcaaatgctctttatgcatatgaaagacttttttcagcgacatcttcagctggatgcgtttgttgacaatcacaatcatcgcgattaatccgatgacgcgggcgatagatgtggacatggccacaccggcaacaccgagaacaggaaagccgaacaaaccgaaaatcacaacaaagtttccggcaatgtttaaaatgttcatgccgatagtgacaaacattgtatcttttgtgtagccgtagctttttaagatcgcgctgaatgtcatgattaaagcctgaataaaggacagacctccgacaacttgtaaaaagactttcgcatcaggcatcagtgcgtctgataatcccatcatatgaagcagagggacagccgcgaaaaagacgacggcgctgatggccaggctgatgaagaagttggcgccgattgacacataagcgacttccatggcttctttcttttgccgtgagcctagaaattgtgaaatgataacggtcgttcctgttgcgataaagctgaacatcacgataattaaatttaaaatctggttgctgacgccgactgctgccacgctgttatccgagtattggctgagcatcagtgtatcggcattacccataaacatatataatgagacctcaataaagatcggccaagtaagcgaaaataatgagaacgttttgtcagcgggttttttcaaagcagttgatttgaagacagcttgtttcatcgtgtctaacccctttcgtaaataaaatcaacgttttaaagtgtacctccatttccttataataaaaagggatagaaacgatacttcttgtaaaaatccgacttaaaaaggaggatgattcaaatgcctcgcatcctgtttacagtcccgccttttccggtatttatcgcagctggggaaggggtttttaaaaaaggagaaacccatgtgaaacgtgtattctccgtgtttgatctgatatatgtcaaacagggaacgttatatataacggaaaatgaaacatcgttttctgttgaaggcggcgagtacatcttgctttctcccggtcttgaacactacgggacgaagggcagtgatgaagcaacctcctactattggcttcacttcgatgaacatcgatatgaatttacggcaaagggaggcagcaactggtctgagcttcagcaggaaaaagggagcttcgaagagccggcccgctacggattggccttgccgagaaaaggcaaggtgcagcgcccgcagtttatggcgcagcagtttgaaaagctgatcgattactccgcggaaaactctgatttgccgctcagaaagcaaattttatttgaggagctgatgctgcatcttcaaaaagaagcgttccaaataccgtctgcgaaagagcgggtagcctgggaggcggcccggtatttacaggagcactataaggaaaagacgacaatcaaggatctgtcgctcgcccttcactatcatcaggattatgtgagccgctgcatgcagcaggtgctcggcgtaactccggcacaatacacgaaccgggtgagaatgacggaagcgaagcgtcttttatcctctacaaatgataaaatgggcgttattgcggaaacggtcggaatggaagatccgacatacttttcaaaactctttaagcagatagaaggcatttcaccaattgaataccggaaaattgtcagccggaaagttcaataaccagacgagggatgaacatgaaaacaacaatttacgatgtggcaaaggcggcgggtgtttcgatcacaactgtgtcccgtgtgataaacaatacggggagaatcagcgataaaacacggcagaaggtcatgaatgtcatgaatgaaatggcatacacgcccaatgtccacgccgcggcgttaacgggaaaacgaacgaatatgatcgctctcgtggcgcctgatatttcaaatccgttttacggcgaactggccaaaagcattgaggaaagagcggatgagctcggttttcaaatgttgatttgcagcaccgattacgatccgaaaaaagaaacaaagtatttttctgtgctgaaacagaaaaaggtggatggcattatttttgcaacagggattgaaagccatgacagtatgtctgctttggaggaaatcgccagtgaacaaattccgattgccatgatttctcaggataagccgcttcttccgatggatattgttgtgatagacgacgttcgtggcggatatgaggctgccaagcatcttctgtcactcggccacacgaacatcgcctgcattatcggagacgggtcaacgacaggcgaaaaaaatagaatcaaaggcttccgtcaggcgatggaggaagcgggcgtgcccattgatgaatcacttatcatccagacgcggttttccttggaaagcggcaaggaagaagcgggaaaattgctcgacagaaatgctccgactgctatttttgccttcaacgacgtattggcttgtgccgccatacaagctgcgagaataagaggcataaaagtgccggatgatctttctatcattggttttgataatacgatactcgcagaaatggcggctccgcccctgacaaccgtagcccagccgataaaagagatggggcggagcgtcatcgaactgctggcagaagcaatagagggaaaacgaaaggcgaaacaaaaaatagtgctcccgcctgagcttgtagtcagacattctacatcaccgctcaacacatgagcccgctaatgagcgggttttttcattatgacagttgaagccaaaaaaacatattgcgtgtaaaccaaaggcggtgtaaaatataaccatcttttgagaaagcgcttgcgcaaaatggcagagcggatagaaccgctgtttttttagctgttaagagaaaacgctttctcaaagcgagcccgaaatgagataaaggagaggatgggacgtggaacatcaagtaagatgtgcagtattgggattaggaaggctcggttattatcatgcgaaaaatctcgtcaccagtgtgccgggggcaaagctggtttgtgtcggtgatccgttaaaagggagagcggagcaggttgccagagaactcggtatcgaaaaatggtcagaggacccgtatgaagtgttagaagatcccggcattgatgctgtcattatcgtaacgccgacaagcacacatggtgatatgatcatcaaagcagccgagaacggcaaacagatctttgttgaaaaaccgctgacattaagccttgaggaatcaaaagcagcttctgaaaaagttaaggagacaggtgtcatctgccaagtcggctttatgagacggttcgatcccgcatacgcagatgccaaacggcggatcgacgctggagaaatcggcaaacctatctattataaaggctttacgcgcgaccaaggcgcgcctcccgcagaatttatcaaacacagcggtggaatttttatcgactgttccatccatgactatgatattgcccgttatttgctaggggcggaaatcacttctgtttcaggacacggcaggattctgaacaatccgtttatggagcagtatggcgatgtggatcaggcgctgacgtatattgaatttgactcgggcgcagcgggggacgtcgaggcaagcagaacctctccatacggacatgacatccgggcggaggtgatcgggacagagggcagtattttcatagggacattgagacatcaacatgtgaccatcctatcggctaaagggagcagttttgatatcattccagactttcaaactcgttttcatgaagcctactgcttggagcttcagcatttcgccgagtgtgtccggaatggaaaaacaccgattgtgactgatattgatgcgacgatcaatttagaagtgggtatcgccgcaaccaattcctttcgaaacggcatgccggtacagctagatgtgaagcgcgcttatacaggtatgtaaaagctaagtatgttgcatttgaggctttccgcaaaaaaagcaagggcattttagcccttgctttctcttttctcatataaatagtacatataatcagtaggtacgcctgaatggtccagctgtctcagcatggcggttacgttccctctgtggtaagtgccgtgattgacgacatgcaggatggtgtctgcataggttgattccagtgtacctagtttcggatgctgcattgtgaaggtctgttctaagtccgtctggcggctgaagaaatcatgatactgtgactccagctcggcagcgtgctgtttaatcgctgccatattaccttgcgcggactgtaatttgcctgcgctgtctataatctcttggtaggccactcccgaaagaacattcagccaaatgtagtcagccctgcacatatgaagcagcacgtcgctgacagaaggaaatacgctctttacttcttgataggcagtttcctccggcaggttttcgatatgggtaaatattttcttgtttgcccaagaatgatagtcataaaactgttttgcatcagtcatcagcatgcccccttttctaagaaattcgtttttttcatctgtttctccttcaattgcaaaagagtgacaccccaaaatatcctgccgctgcccacattaccgctgcagagcatttgtttacgatcagcataagcctgccgctcgtatctatcgtctgaaacaaccggcccgctattgcaaggctgatgaaccaaatccaagacacagcgatgcaggcggccataaagagccatttctcaagccccgaatattgaagagagctcgtgccgatgacgccgatcgtgtccagaatggcatgcgggtttaaaagagaaacagcggccgcaaacgcagcttgcttttttggtgtgaacgtatgtttctcattttggcttgtgttcggacggatgttccaagtcacccagcccatataaagcaaaaataaaaatccgccggccatcatgactgtctcaaacacaggcagctcctgcacaatgacagacacgcccgcaacggctaatacaattaacaaggtatcgcagactgaagcactgatgacagctgggagagcccgccaaatatgcttttgcaacgcgccttgctgaaaaataaacacattctgcactcccagcggcaaaattaagccaaacgcgagcacaattccgtgaatgattgcattcatgctgaaaaagctcctttcacattttttttcaatcataagagagattgtcactaaagtctccagccatttggttgggttaggaaccagccaaatgtataatgtgtaaaaaaggggggcatgaccttgtcgcaatggcagccaagccgaaagtcggatgttccgctgcatcggcagatcgaacaatatatgaaagacaagattcttcacggagagtgggctgtagggacgaaaatcccctcacagagaacgctggccgacatgtttcaagtcaaccgcagcacagtcacagcagccatagatgaactcacgtctcaaggcttgttagagggaagaaaaggcggcggtacgaaggttgtaaacagtacttggagcgtgctgacggctgagcctccgcttgattggagcgattacgtccgttcgggcattcatcgcgccaattcttccatcattcaagctattaatcagaacgaaccaagagcggatatcatcagattaggaactggagaactttcaccggatcttgtgcctgctgacacaattggacggatgtttcagcaaatcaatccgggcgtcctgtctttaggatatgagcagccgaaaggaaaccgtcagctgcgggaggcagtggccgaccatttaaaaggaaagaagatccatgtgtcaccgtctgcaattttaattgtgtccggtgcacttcaggcacttcagctcatctcaattggacttttaaaacgagattctgtcattttgacggagaagccgtcctaccttcaatccttgcatgtatttcaatcagctgggatgcggcttcgcggcttgccgatggatgatgaaggggtcaaagcggggcttgtttcttctaatcgaaaacaatatggaggacagctgctttacacgattccgtcgtttcataatccgacaggcacagtcatgtcagagcagcgaaggaaagagatcatcagcctgtcaaaaaaagagcagatgcccatcattgaggatgatgcgtacggtgatttatggtttgaagaaaaaccgccgcagccgttgaaagcaatggatcatgagggcaatattctgtatctgggcgcgttttcaaaaacggttagccccggtctgcgaatcggctggcttgccggtccggagccggttattgaaaggctggcggacattaaaatgcagacagactacggatcaagcggcctgtcccagtgggcggctgccgagtggctgtcacagggatattatgaagagcatctgacttgggtacgcaggaagcttaaagaaaggagagacgccgccgttcattttctcgagcggtatgccggggacattgccacgtggcggattcccgcaggcggcttttatatttgggtgacatttcacaaaaacctgcctgtcagccgtttcttttatgaattgctgaaacggcaggtgcttgtgaatcccggctatatttatgacggtgaagaccgaaacagcatcaggctgtcatattcctatgcatctcttggagatttggaaactggcattaaagcggcagctgaaacagcacgccgcctgatgatgtcctaggctttggttatacgatgacagctcccagtgccctggcgaaggcaatcgcgtgctcaggtgcgattttgcagcctttcaatttgtcgagggagacatgaagctgttcaaaacggcacgtgctgatgtccatgttttgaagggacgtgccggtaaagctggcgccttccaattcgcatccgtcaaagtgtgtctgctggagcaccgtatcgctgcattcactttgcataagagcacagtgatcaaatcgaacttgtttcatatttgagtacgaaaatgagctgaaatgtccgtggcattcctcgaatgaaacattccgcagcgttgcttccgccacattcattccaaccatttttgactgcttaactgaagttctgtgaatgacagccccgctgaaatcggcgtttgataaatcgcatttttcaaagatcacatcggtcagttcaatatgccgaaaagacacatcgataaagacgacatttctgaataccgttttttcaacacatagtctttcgatatcttcgccgcagatggtgcaatcttcaaacaaatgcatgctgattacatcatcctgtgtcacggcatcatgaaaatctgcggtttgcaggttttccggtatgttcggtttttgaattgcgattttattcatgtgatgacatcctttgctgcccgaaaaacagaggcttccgggttcaatttaatagatcgttaaggaaattgatacatatagtaaatcgtgaagagccttttcttggtacagcagcccgcttgttttgtaagcataaatggaaagcttcctatacgtcaaggcgtttacaggccgaaaaagccaaagggaacaggaggaatgcggaatggggcattacatcaaaaccgaggagcatgtgacactgtttgtagaggatatcggacatggaaggccgatcatctttttgcacgggtggccgttgaatcataagatgtttgaatatcaaatgaatgagcttccgaaaaggggatttcgttttatcggcgttgatttgcggggatatgggcaatctgaccgcccttgggaaggctacgattatgacacgatggccgatgatgtgaaagcagtcatttatacgctgcagcttgagaatgcgattcttgccggtttttcaatgggcggcgcaattgcaatccgttatatggcaaggcatgaaggagccgatgttgataagctgattttactgtctgcggcggcccccgcgtttacaaaacgcccgggttatccgtacgggatgaggaagcaggatattgacgatatgattgaattgttcaaagctgatcggcccaaaacactggctgatttagggaaacagttttttgagaaaaaagtgtctccagagcttaggcagtggtttctcaatctgatgctggaggcttcctcctacgggacgatccactcgggcatcgcattaagagacgaagatctcagaaaggaacttgctgcaatcaaggtgccgacgctgatcctgcacgggagaaaggatagaattgcgccgtttgattttgcgaaagaattgaagcgcggcatcaaacagtcggaattggttccgtttgcaaacagcgggcacggagcattttatgaggaaaaagagaagatcaacagtttgattgcgcagttctccaactcataagaaaaaacccgacattgatcgggttttttatataattcctctgttttgcagtgcgttaatgatgagatcagctccatcggaaatagaggtctggtcagactcaatgatgaaatcgggtgaaagcggcgcttcatacggagaatcgatcccggtgaaatgtttgatctctccgtttcgcgcttttttataaagcccttttggatcgcgctgttcacaaacatgcagcgggcacttcacataaatttcgaagaactcacctttaggaaagagcgctctaaccatgtcccgatcctctctgaatggagaaataaaagccgttaaaatcatttgcccgctgtcgacaaacagcttcgccacttctccgatccggcggatgttttcaatcctgtcaccagtctgaaatccaagatctttgtttaagccgtggcggatattatcaccgtcaagcacgtagctctgaatgcccttgcggtaaagcttttcatcgacagcattggccagcaccgattttccggagccggacaaacctgtaaaccaaaggacgcagcttttgtgtccgtttaaggactgtctgtcagactttgagatggcagcgggatgccaaatgatgttcggattgtgtgtcattgcaattccccgctgttttgcttgatggcaacaggctgttggtgaagtcccttgatcagcacggctgcgacctcaggccggctgaattctttaggcggctttttgccttggcggagaagctctctcacttttgtgcctgataagtggatgtggtctctcgggctgtgcggacatgttttggaggtgcccatgtttccgcattttcggcaataaaagctgtgctcaaaaaacagcggcttgatgcccagctcttcctctgtgaatgattgaaaaatattttgggcgtcgtatgttccatagtagctgccgacacccgcgtgatcacggcctacaataaaatgggtacagccgtaattttttcggacgagcgcatggaaaatcgcttcccgcggacctgcataacgcatggcggcagggaaaaccgataacatgacacgatcctttggataatagtgattaagcaaagcctggtagctctccattctgatatcgctggggatatcgtctgactttgtttctccgacaagtgggtgaagcagcagaccgtcgaccgtttctaacgctgttttttgaatgtattcatgcgctctgtgaacagggttcctggtttgaaagccgacaatcgtcttccagccgagtttttgaaaggccgctcttgtttcagcgggcgttgcataaaactgttcgaaagatttgtcaggcaggctgctgaccgtgataggccctccgatatagtaatccgggcgcgccagcaatttttttacgcctgggtgggcaggatcgtttgttttaaaaacagacagtgcttcttgtgttttatcaggctggtatatatcggtgactgtgatcatgccgtaggtaacaccgtctttcacaagcttgacgtgatctccggcagacagctgtcttgctgttttttctccgacaggcagcgtaatcggcaggctccacggcaagccgtttgccagcctcatctctttcacaacggaatgataatctttttctcccaaaaaacctgttaacgggctgtagccgccgatcgcaataagctccagatcactcagtgcaagctgatccagctctgcttggcacgcgcacccttcaaaatggcatgcgggatcacagcggttgattaatacccctccgtggggttcgtttccattcaacgtgttcaacctccatttatacgtttccttgttttcttttctgcacttaatgaaagtttgacatcagcgccttaacatcatttcgattctcacatcaagaacctgccatccgctattcttgatgcaggccgcattctgttttctcccgtccggcccatcttccagccctctcatcgttcgggtccggggaaggcagtgtacacatttcacagcctatgctcggataatgttgatcgtgcagtttgttataaggcaaattgtgcaggcggatgtacgtccaaacgtcatcccatgtccagtggataagcgggcaaattttgatgagctcaaacttctggtccaggtttacgtattgaatatgctttctcgttggtgactgatcccggcgcagtcctgaaatccaagctgtcatgccggacaggtgctttttgagcggttcgattttccgcaattggcagcagaggttcgggttatgcttccacagctctccgccgtacttcgtcccctgttctgttaagctcagctcgggttcgagcatctggattgcaaatcccggatatcgttctttgacggtctcgatcagctcatatgtttcctgaaaatgaagcccggtatccaaaaagatgatgtgtgcgtttttgttgatttttgatattaagtcgagaagcaccattccttctgcgccaaagctgcaggcgtacacaatcttttctccgtacgttcggtaagcccatttcaacacatcgagctcatcgatcaattgatccgttatctgtttggacagcatgtcgttccaagtgtcatatgtgatggtttcgttcaatgttttccccccgtttgcatctgctttttttatctattgatcgagttataggcagactattcattttttgcataaaggttcaggttttaggtgccgcgcccgcctaaaatgaggtgcggaaccattaagagcccggctgaatatgctttttagcaaaatggttttatgcccaaggagaggtagtatgccgattgccatttatcaggggcatcatcattcgcttgccccggcggacattaacatcgtcattgatgtcatcagagcctttacggtcgcccattatgcgtttatcggcggggcgaaagagattttgttggtccggacagctgatgaagcctttgcgctgaaagacacctatccggattatgttttgacgggagaggaaaagggggtcggtatcagcggatttgatttagataattctccaaaacgtatggctgggcagaatatgacggataaaagcctgatccagaaaacaacaaacggcgtcacagcagcattgggggcgctgaacgcaaagcatctgttcgtaactggattttccaatgccaaaacaacggcacagcatgtgaaaaagctcgtcgcaaacgattgtgtcataaacatagtggcttcccatccatccggtgatgacgatatggcatgtgcggagtatatcaaaggcatcattgaagggacaaatgtggtaacggctgcggaggcgattgaaagaataaaaggctcttctgttgcggagaagttttttgactgccgccagccattgtttgattcggaagacatcgtttactgtacaaaagaactgacgggcgatttcgtgatgaaagtgaaacaagatggagaagttccaacgatagagagggtcataatatgaatgatttttcactagaattgccagtgagaacaaacaagccgagagaaaccgggcagtccattttaattgataacggctatcccttgcaatttttcaaagatgcgatagccggagcgtccgactatattgattttgtgaaattcggctggggcacatcattacttacgaaagatcttgaagaaaaaatcagcacactgaaagaacatgacattacatttttctttggcggcacactgtttgaaaagtacgtaagccagaaaaaagtgaatgaatttcatcggtactgcacctatttcggctgtgaatatattgagatttcaaacggtacgctcccgatgacaaataaagagaaagcggcttacattgccgatttttctgatgaatttcttgtgctcagtgaggtgggcagcaaggatgcggaattagcaagccggcaaagctctgaggaatggcttgaatatatcgttgaggatatggaagcgggcgcggaaaaagtgattacagaagccagagaaagcggaacgggagggatctgttccagcagcggcgatgtcaggtttcaaattgttgacgacatcatttcctcggatattgatatcaacaggctgatttttgaagcgcctaacaaaacgcttcagcaagggtttattcaaaaaatcgggccgaatgtgaatcttgccaatattccatttcatgatgccatcgcgttggaaacgctgcgtttagggctaagatccgataccttttttctgtaaaatagcggctgcggggctctcgtcgtgaagagagcctctgcctattattttttatggcggtacataggcgtgagatagggaagtgaggtcaggcggatgttgtagatgaagtcgatgactcttgtcgatatcacctggcatatgagggcttgaatgacgatgccccagtcaataatagacgcggtgaccataaaaatgatgcaattcatgatgagcaggatcgttccaggattcccgccgcggtagatagaaatcatcagagcaagggctccgaatcctccgttcgaaattttatatttgtataaaagtccgattccgagtcccaataacactgcgccgcttgccagatcaagccacaggttagatgtgatatcaggaaaaactgcatcaaagatcaataccgagacagaggtgacggtgatagaagcgagggtgccggtgaatgttctcatctccagccattttaaagcggtaaaaagcattgatacattcacagcccacactgaaaatccgtgggggatttgaaacagataatgcaatagcaccgcaatacctgctgcaccgcctgtcggaatatcatgcggaaataaaaacaaggacatgccgagtccttgtagtacgccgcctacgacaatcataaacgtaagttttgctttcatcagcagttcagccattaagtcatttgctcctttatgaaaagacttgtccgctgttttcattttatgaggctgtccattatttatgtctcaaaataaagaaatggcccagcttaataggctgagccatcccacttgtagcgattgacgatctccatattgatctctgtgccaatgccttttcctttcgggatgtggaccattccttttgaaggctgcaggctgacgagatctgtaaaaggattctccatgacgtcccactcgatcggttcaatgtgatcgttcttcattttagaccatgggggcagacaggcttgtgcaaataaagcatagagccgtgagagcgatccgtcatatgcatgggcggatgctctgacgccgaaataacgcgcgagctggaggcagtcccgaaactcatcaattccgttgacatgcatgacatcgggctgaatgatatccaaacagcgctgtgaaaggagaggcacatattgcgccgggcctttcatgttttctccgccggcaacaggaacagacaaacggcttcgaagcatagcgtaatcctgcggctgatcaaagggcaaaggctcctcaagccagccaatgttcgtccattcggagaaatagcgctcccatttaaaagccgcagcggcatcgtagctttggtttgcgtccagaatcatcgtaatggagctgcctgctgtatgctgcagcgcattgatgtgccggacatcctccttgaatgaagtcccgccaattttgactttgatttgctcaaaaccttttttcaactgggcttcaacattggagactgagcggctgatccattgcggggagtctgagtacgattgaaaagacgcgtacacaggaatctcctctctgtatcgcccgccccataattcgcaaaccgaacaatccgcagctttggctgcaatctctgtcagcgccatgcttacagcggaggccgcccgctggtgccatttttgaatcgtgcgcactaatgacaggcggctgccagcctgttttcctaatagaaatgggatgatccgcttcgtaaaaccgacatggagagcagggagccaatcaacgcattctccccagccgtctatcccgctttcggtgataatcctgatgagataacaagtccgatatcgtttaaacccattggcatctccgtatggcttttctaatcgatgaaatagcggaaaggtttcaatccgtacaattttcacactgggtgctacctttcctcagcgggctggagccgattgccagccattttagggtcttctttttcttttgtttcttcattgttttgcttcacatggatgagcatcatcacaagaatcccgacaacgagagtcaatcccgcgatgcttaaaaacatgccgggtctggaccattgcatcaggcggccgaaaatcggaggaccgatcgctacccctaagaaacgtacagagccgtacagcgaggtgacaaatccccgtctttctttgccgacagccccggtaatgaaactgttcacacaaggaaggacaagacctgagcctatactgctcagtacaagaacactgataaaaaggacaagattttcaatgaatgacagtgccgcgtaggatacggtcatgaacgccaatccaagtacgatcagctttttcattaacgattgcttttgcccgattttgcttcctgttgtataggacgtcacacacataaccaaaagcgggatcgctaaaattaagccttttttcacgccgtcggtgtcgtatgttttttcaagaacatctgagagataaaacaggatgccgaataaagtaaacaaacaggtcgcaccggctaaataagcggtaaacagccatctgccttcatgtttaaagacacttaacagcccttttgcatattgtccgattggtggcggttctttttcctttttcttttctttaataaaaatccaagtcagtacgatcgaaatgatacaaaacacaggaaaggcaaaaaacgcgccataccagacaagcagggcgatcagcgagccaatgatcggcgatagcactttccccatgccgtttgaagcttcaacaaggccgagcaccttgctctcctgggcgcctttaaacagatctcccgtcagtgccatggcaattgggccggttccggctgccccgattccctgtaacgctcgtcctgccatgacccaaggataggcattgtcaaaaaaacctgccgcaaacccggctaacaaaccgccggcaccatacaaaattaagcagggaataatgatgactttccttgagaatcggtctgcgagataaccgacaatcggaatcgcaaatgctgcaatcaaggaaaatactgtgatcacgagactgacttgaaattgtgataaatgaagttcagatttcatttttggcaaaatcggaataagcatcgagtttcctagggttaatattaaagggattgaaccgattgccacaatcgtcattccgttattttgttttgatgattccatctcagagcacactccttttcttctgcttagaatgtccctgatggcttcgtttattcagcgatcagacagcaaaaaaccgaacagaagatacctgttcgggaaaaaagagggttaaccgagagcctgtgaaatcaaagcatataagtgtccattttgaataggcgcttttttctgatagaacaaaatcggaggttcatcatctttatgaaatcccatttctatcaggctgtcatgcagagacgtgtgttcactcggtatatcgattcgcatcggcccttgtttgccggccgccagccttgtaattatctgtgctgcaacatctgatgatggagcgatgatagggccgaatttcaaattggccggtgtctgtacagaaagtccgtagccaatgagctgtccgtcctgatttctggcgatgatacattcgcatgaagcagaaataagctgctgcaaaaggtttgatcgatctccgccaaaggcagccagatccgccgcggttaagtcgtgaaagtcttgttctctaaaggatgtcagttcagcatcaagcttttttgtataaggttgaaaactgtgacagctgtactttcgcactgaacctgccgtatgaaaacctgctttttcataaagcggcaaaccttcttttgtggcgcaaagcctgatggcggtgttttcatccgtttgggtaatacaggcgtttaccatacgccggccaagaccgagccgttgatattccttgtcaacgataacaaggccgatagaagtaagacggccaaacaaaaacaagccgatgcaggaaataatatcaccgctgacattttgataaccgaaaaagcgtccctgctgaacaagcagtttcagctcttgttcgccataatccggccacccggcttgcccgcaaagccgcaataagccggaaacgtgttcttcatgaagcttaatcagttcatctactacgtccataagatcacctgcttgttctaagtgttttgtacatgacaatatgattgccaatgccgggaatgtcaaatggttcgccaagttccttccagccaagcttggcatagtagcccttgacatggtgtcttgcgttgcaccataccgcctgaacgccgctctccgccagtttgtgctccgcgtgtttgatcagcgtgcttccagctttttgatcgcgatatccctcgagcgttgccatgcctctcagccgatacgcagaggcttccgttaataaaggctgactttgcggggaaaaagaagcgatgctgatcagcgttccatcataaaacacgccgagatgaaaggagccttctgcgtgatcctctttatatttgcattgttcgatggattgatggggacgcagaatgcgatgccggatttcatatgtatcttccacggaaatggttttgacttcgagcataatgttcctcctcatgattgtttttctatatcgtaacacgaatctcgttgaaaaagactgcccgattcgatcaggcagtcttttggaaattaatgcaaaaagatattttggcgctgctcatctttttgctgaatatatgatgtgagctcagcggttaagtcagatctgaggaaaggcgttatcaagtagatgccgttaaacagctcgcatgccgtatccagcagggagcgtgcaattgcaaggccttccgccttttgcttttctttatcttcaccggcatgggccattttttcgcgaatcgtatcagacagcttaatgccgggaatttcattatggatgaattcggcattccggctgcttgtcagcggcatgatgccgatatagatcggcgtcttcagatgttttgtttcgttatggatatcgacaagctgctgctcggaatagacaggctgagaaacaaaataatctgcgccgcaatctatttttttctcaagccgttttaccgctttatccagatggcggacgttaggattaaatgcggcggcaactgagaaattcgttttcttgccgagcggttttccagacagagacagaccttcattgaattgtttgatcagcctgattaaatcaaaagatgttaaatcatatacagacgtcgccccaggaaaatccccgattttagaagggtcacctgtaatagcaagcacgtcattcagccctaacgtatcaaggcccattaaatgtgactgtaagccgataatgttacggtcacggcacgtaatatggacaagggaacgcatatcgagctgctgcttgacaagggcgccgcaggcaacattgctgatccgcggggtcgccaaagaattgtcggcgagtgtcagggcatcgattcccgcttcttttaattcagcagcagcggacagaaatttgtcaaagcttagttttttcggcgggtccagctctacgataatagagcgttttttcgctgcgatctcatccaggccgggctcggttcgctcgtgatgaacagaaatgaattctttcgcccgggttttgacttctttttccgtaatcggagccagcccgccaaccgcttccgccatcgccctgatgtgattcggcgttgtgccgcagcagccgccgataatccgcgcaccttgcttacggaattctgacgcgctgttttgaaaatacgtgtcgtctgtttcatagacgagccgtccctcttcaagcgaaggaagactgctgttcggataaacggataagaatacgtcatcaaaaatcggcacttcgcttagcgcttcaatcatgtgataagggccgaggcggcagttaatgccgacaatatcagctccgagatccgcaatcgagcgcaatgcgtcagaaagcggcgttccgtcctgcaatacgccttgctcgtgcatggagacattgagcataatcggaagatcagtctctttgcgcgcgattttcagcacttcacgggcttcttccaaatcataatatgtttctaacagcaagccatccggctcttcatgcagcagcagatacagctgctcgcggaagctgcgcttaatttcgtcaagactgtatgcgtttttattaaatgtgcgtatgccgcccatcgttccaagcacgtatgcatcgcctgctgaagcccgcgcgatctttacggcctcctgattcatttttttgatgtcatcctcaagcccgtgtctggataatttaatatagttggctccgtacgtattcgtttgaataatgttggctcccgcttcaacgtacgctttatgtatgcgctgaatttcctccggctttgaaatattgagctcctcaaaacacctgtcaatgccataggagtagaggagcgtccccatggcgccgtcaccgattaacacctgtctttgcaaatcttctaaaagtcccattgtctgcctcctttattcacatcagcaaggaaaaaagagaaataaaaaaagtcctcttaagaagaagactttgtcagtgattttgtctcttcttatcttccaagctgttcgagcttgctggatttagcaccttggtcatggctgatcgccattacaccggttgctgaagcttcgtcgggccagtccctctgcttctcttgataagaacggatatgaaattttcgtgtcaggaagtgccaaaagatatctggcgtttttccctttctccaaatttaccgaaaataaagacaataatcaataggaatcagaaaatttatctgaaatttataaattgaacgtcaattggcagatctgctccccgtacagctgagataatctgctgcaggtcatctttgttttttccggtgacacgcacttgatcatcctgcacctgagactttactttcagtccggagtttttgatgatcgtattgattttttttgcgttgtccttgtcaatgccttgaacaagctttgcacgctggcgcaccgttccgcctgacgcgttttcaaccttgccgtaatcaatgttttttgtcggtacgtttcgtttaatcaatttgctgaccagcacatctttcagctggcttaatttgaattcgtcatcggaaacgaggaccagctcctctttatctaaagaaatgtcgcttttgctgcctttaaagtcatatcgggtactgatttccttcagtgcgatttggattgcgttttgcacttcaggcaattccaccttggatacaatatcaaatgaactttcttttgccatatgaaaacctccataacatttaacttatgtgttgattatagtagaataaagagaaacttccaacagaacaaagaatcaatttgtgatgattggaaaaaatgttaacaaaatccgcagagaataagcggaacaggaaggacgatagcatgagaccagggcagcaattaaccttgagtatagatcaccaaaccgacttcggttactttttaaccgatggggaagatacgattctcttacataacagtgaaatgactgaggatatcgaggacagagacgaagtagaagtctttatatacgtagaccagcaggaaaggcttgcggccacgatgaaaattccgatcatcagcgcggatgaatatggctgggttgaagtggtggataaagtggaagatatgggcgttttcgttgatgtcggtttatcgaaggacgcactagtcgcaactgagcatttgccgccgtacgaagatgtctggccgcaaaaaggggacaaactttactgtatgctgaaggtgacgaaccgggggcgcatgtttgcgaaaccagcgccggaagatatcatcagcgaactgtttaccgacgcttcagaagatctgatgaataaagagctgacaggtacggtgtacaggctgatcgcatcgggttcattcgtgatcacggatgacggtatccgctgttttattcacccgtcagaaagaaaagaggagccaagactgggttcaagagtcacaggccgggtgattcaagtgaaagaagacggttcagtcaacttgtcgctgcttccgagaaaacaggatgcaatgtcagttgatgctgagtgcattctaacgtatatgagaatgagaaacggtgccatgccgtacagtgacaaaagccagcctgacgatatcagagaacgttttaatatgagcaaagccgcctttaaacgcgcgctgggccatttgatgaaaaacggaaaagtgtatcaggaaaatggatggacatacgagaaaaaatagcatgaaaacggctcgcctgcagcagactgcggagcgagccgtttttttatgtctagtttaattcatcaaccagcgttctgattgccatttcgcgatccacattgtctgaaatcgcaatcggcgtaatatcaatggcgagaatgatcagaatcagggcacctgctgcagcaacataagaaacataatagaaatagttagcggtatcaacagtgttgacaagctcggcctgaactctggatgtatcatccttagaagcggcgatttcctttgcagcttctactttttcttcaacgatttgacctgcttttttcagcagttcatccactttcaatgcatctttgctgtaaacagctttcttcaggttatcaaaaaagtcagcatcctcttttttaatatcagcgacaacctgattggcaaaagcctttgcctgttttgtgttgagtttgtctgtcatcgctttattaaagacctctggaagctgtttgccaacttccccttgggcaaacacaaagcctttaaaaatttcctcacctgaatactcaagctgctttgcctgtgccacactttcttgctgcttcaccaaaaacacagtcgtcaccaatacaaccgacaaaaatactagaaacgccttcttcaaactgaaacctctcccttcttgtgttttttattccacaacagtctgcgaatatatgtaaattgaatcgtggaatcgataggagtgagatacaatatcaaaatgccggccatgataatcgaaaaactgatgaggcccagcatgactgcaaaaatctcatgcataaaaacagcgatgatcaaaatcaatctccaatgcttcttcggcgcaaacagtgccgcgaagatgacaatttgaaccagcagcgtcccccatgtcggaatcaccacgaacggacttgttacaattggcttcgttaacgcctgaaaaaagccgttgaagccaatggttttttcctgggcgaaataatagacggccgttccgtccacccattcctgctgagatagcttagcgacggtagagtgaaaataaagcaccgccacttggattctgatcacaaaataagaaataaaagctgttatttttccaagtgttcttttgccctctataggtctcgtactccaatgccattttctcggatcggtcagcgtgatgggaagcaataaaaaggtcatgactgctgctgcctgctcgcctccgtcgatgacgatcagcgatgactgcaggctgtaactgacataccaatgcagaaccccggtgattctggggcgccagccaatgacaacaagcaccagaatggcaatgcagacccatctgaaaagatttaacatcatatagttattttcgccgagacaaaagagactgagattcattttacaagctggatagctgctgatcccgctggctggcttcataatgaggctcgggtgattgatgagcagcgtcagcaggctggatagcgcaatgatgcttcgcgcgaggccatatacatttgtccacgggtttctttcgtcccatctggtgatggtctgttttatgttttcgagcatgagatcacaaccttgactatgctttttacctgataagacgaaggggtatatttagaatagctccaaggaacaatatcctctttcgtcaaatagtagctgccacaaagcagcgggcggggagcgggtgtttttaattgcacggttttggctttgcttttgcatgcgccgaggtccttttctttacatgctgtccactgttccttgccgacttggctgtagatcacgcccatttcaacgccttgtgaccgcccataccgatacaggccgaataggttgtcagccctcatattgggccatctgaccttggcgctggcattttcagcctcatataagccgattgcagtatcacgcggatttttgctaaaaaagccccagccctgagggaggatgctggacatgagaaatttggagtcctttgtcagcggaatcggggttgtccctaagctgccaataatagaaaacagaaatagcgaaccccaaaggattgaaaaaatgacaaaaaatgatatcgatttctgcattcgactgctccttttaacctgaagaatcgtttttacacttttcataatataaaaacatttatgtaataaaaaggttaaaaagtatgagaaattccatttttgttaaaaggaaaaacaggacattttacactgctatatgtgattgatatatagtgtttttttcgatatatttaaaccatgaaaacgaatcaagttaatgaccgctggattgttcaatttcgaaaagggattttcgagctggccatcctatcccttctgcgttctaaaccgatgtacggttatgagctgacgtcatccttaaaaaccacctcggcgctggctatttcagagggagcgatttatccgattttgaaacgtatgaccgagaagggatggatcgaatttttttgggaagattcactggacggcccgaaaagaaagtattacaaaatgacgcaaaaaggagaagaaatgttaaaagaacggctggagaaatacctggaaacccatcaagccttactgtctttatcgggggatttgctatgaatggacagcttatcattgaccgatacatggaggaactaaatgcagagctggcgaatatgcctgatgtagagagagaaaacgctatcgacgaattaaaggggcatatcaccgctttcgttcaagacagaatcaaagccggccttagtgaagaggaactgcaggaagctgttgaatctgaattttctcatccgaaggagcttgccgaattgatgatgggtgatgggggagagacgaaaaggaggaggtctttattgggcaaaagctggatttcggtccttctcattgtcacgattatcgccctgccgctgctgccgtccgacttcagacatctgccgctggctgtttatttaatggtgctcgccggatatgtatggaagcggaaaaaattggtgatgtttgcaggtgtcagaaaaaacaaaatgcgctctcaaaaggagattgtcaagatttcgcgagtcggtgcggtttatctgctgtttttagcagtggtgctccttttgagcccgttcctcaatgcgcttgtcgtcctgctgctgattgcagtaagctgcgccgctttttttctttttcttaacatcaagtaatcttgtaggaggctgtaagatggaaatcagcatcaattatctattaattgtcatcgcgcttttattctttgtggttgcctattttgtcggaatcaaaaaacaaacctggatgttggctgggtttaacgaggcgcgtatacgggataaagatcggctggccagaatagcaggctactttttcttgaattccggtttgttcattttgctgaatagttttatctcatttcaaggtcaggagcagctcatacctccgcttatactggcatatggagcaggggttattatttatgtcaataaaaaattagtagagtagaaaaagaagggcagagcgaaatatctctgcccttcttttttgggaaaataagaacgaagcaccacatacaagtttttgtatttttgataggatgaagaaaaatggtagattccaaaataggaaggatgtggtgttttgcgcaacttgaccaagacatctctattactggccggcttatgcacagcggcccaaatggtttttgtaacacatgcctcagctgaagaaagcatcgaatacgaccatacgtatcaaaccccttcatacatcatcgaaaagtcaccgcagaagccggtacaaaacacaacccagaaagaatcgctattttcctatcttgacaagcatcaaacgcagtttaagctcaaagggaatgcgaacagccattttcgcgtttcgaaaaccataaaggatccaaagacaaaacaaacgttttttaaattaacggaggtttacaaaggaattccgatttacggctttgaacaagcggtcgcgatgaaggaaaacaaacaagtgaaaagtttctttggaaaggtgcatccgcaaatcaaggacgtctccgtcacaccgtctatttctgagaaaaaagcaatacatacagcaaggcgtgagctcgaggcttccattggaaaaatcgaatatcttgatggggaaccaaaaggcgaattatatatctatccacacgacggtgaatatgatctcgcctaccttgtgagactctcgacatctgaacctgagcctggctattggcattatttcatcgatgccaaaaacggaaaggtcatcgagtcctttaatgccattcatgaagcggcaggtacaggaatcggcgtgtcaggtgatgaaaaaagctttgacgtcacagaacaaaatgggcgcttttatttggctgacgaaacaaggggaaaagggatcaatacatttgacgcgaagaacctgaacgaaaccttgtttacgcttttgtctcaactgatcgggtatacgggcaaagaaatagtcagcggcacgtccgtatttaatgaacctgcggctgtagacgcacacgcaaatgcgcaagccgtttacgattattacagcaagacatttggccgtgattcttttgatcaaaacggagcaaggattacgtctaccgtgcatgtcggcaaacaatggaacaatgctgcgtggaacggtgtccagatggtatacggggatggagacggttcgaaatttaagccgctgtctggatcgctcgacattgtcgcgcatgaaatcacacacgcagtcacacagtattccgccggtcttttatatcaaggagaacccggtgcattaaatgagtccatttctgacattatgggcgcgatggctgaccgtgatgattgggagatcggcgaagatgtctatactcctggtattgcaggagattcattgcggtcattggaggacccatctaagcagggaaatccagatcattactcgaaccgctacacaggaacagaggattatggcggagtccatatcaattcgtccattcacaataaagcagcttatcttcttgcagaaggaggcgtgcaccacggtgtacaggttgaagggattgggcgtgaagcaagtgaacaaatttactatcgggctttaacatattatgtaacggcatctacagatttcagcatgatgaagcaagcggcgattgaagctgccaatgatttatacggtgaaggctcgaagcaatcagcttcagtcgaaaaggcgtatgaggctgtcggcattctatgagcaaacaaaaacagtcaggacacagagtctgactgtttttgtttgctcattttcttaaaaagaatatcgccactggaccggcatgcgagccgatggctgaactgattggatgcataatgatttctttcggcttgaacgcttcctcaatcaggtgtttcatatccgtggctttttctttgttcgcggcgtagctaatcccgacggtttgattgctccaatcatccccgcgctctttcataagctcgatgatccgtttgaaaagtttcttctgtccgcgaattttttccagaggcacaagcttgccgtcctccatctgaagcagcggtttaatattcaacaggccgccgacaaaagcggacgttttggatatccggccgcccctcgcgagatatgttaaatcatcaacggtaaaaatgtgttcaagctggctgcaaaagttctttacagacgtttcaatttcttgtattgtattcccgttgatacagagatcggcagcatgccggacagccagaccgtatcctaatgaagcgcatttggaatcaatgacccgcaaatcgaaatcggggaattcctccttcacttcattggcgatcattacagctgtctgatacgtgccggagagacctgaggaaaaggcaatgtaaagagcgggatcacctgtttcggcatattgcaaaaacacatttttaatcgtttgcggtgaggcttgggacgtcttaggcgtttctccattttgcatcgcttcaaatatttgatccgcatgaattgtgactgcatcttcgaattctttatcgccgagagaaaccctgagcggaataaagccaatgcctttttcttcaaaataagaacgaggcaaatcagtggcgctgtcagcgatgagatgaactgtcatattgcttcccttctttccgttatcgctcgttatcatgagagttaagccaactatatcatattaatttgccaaaatcgtgttcaaatatttgttttaagggaaaacataataaagaagaaagagcggaggaacatgccatggtactagatcaaacaaaaaaattactcatcgtcatcatcggcgctttactcaatgctgccgggctgaacttatttttgatacctgcagatgtatatgccagcggatttacaggtgttgcccagcttttatcaagcgtcgttgatcaatatgcccccttttacatatcgacgggaacgctcttgttcctcttaaacattccggtcggtattttaggatggctgaaggtcggcaaatcgtttacagtgtacagcattttaagtgtcgcactcactactctgtttatggggatcctgccggaaacaagcctgtcacatgacattttgctgaacgcggtgttcggcggcgtcatttccgcagtcggtatcggcttaacattaaaatacggagcttcgacaggcgggcttgatatcgtcgccatggtacttgcaaagtggaaggataaacccgtcggcacgtatttcttcattctgaacgggattatcatcttgacggcaggattattgcaaggttgggagaaagcattatataccctggttacactatatgtgacaacgagggtgatcgacgccattcacactcgccacatgaagcttacggcaatgattgtgacgaaaaaagcggacgaaatcaaggaagccatttacggaaaaatggtgcgcggcatcacaactgttccggcaaaaggagcatttacgaacgaacagaaagaaatgatgattatcgtcatcacgaggtatgaactgtacgatttagaaaagatcgtcaaagaagttgatccaaaagcatttacgaacatcgttcaaacgacagggatttttggtttctttagaaaagactgacgaaagcaggtggaagtcgtgaaacggctgcttgtgatgctcctccccgtgctgcttttgataggctgcgggaaagatgagcagacagaacccgataaggaggtatcaggcggaatggagaatcaagaggttgttttatctattgacgcaattcaggagcctgaacaaatcaagtttaacatgtcgctgaagaaccaaagcgaacgtgctattgagtttcaattcagcacagggcaaaaatttgaacttgtcgtgtatgattctgagcacaaagaaagataccgttattcgaaagaaaaaatgtttacgcaggcttttcaaaacctgacgcttgaatctggagaaacatatgatttctctgatgtgtggaaggaagtccctgagcccggaacctatgaggtaaaggtgacatttaagggcagggcggaaaatctcaagcaggttcaggctgttcagcagtttgaagtcaaataagaggctatggcgagtcgccatagcctttttttattgcagtttgtccagctgattttgaaattgatgcaactgttgacgttccgcatctgtcgaattggcatacgcagaagatacagcatttttggctctcagaatcgcttgctcctgatcgccttcctcaaagccgtttgtcaccatgaccgcctgttgaacaaatgattttgcctgctgaaacagttcatttctcatttaatattcatactgcctttcagccgagtctcgtgccgcggcatgctggtgagcttcttctaaagtagaccgatatggaaatcttgcggcgtgtagcccgatggagtctttaccctgctgaataaaccttctggatttgcttcgtttacccattttgagactgcccccttccatactttgacgagatgagtcgtcttcaatagtatggtggggtaaagtaaggtttatgagtgggaaaaattaatacggaccttctttaaagtgagaaatattctttcaaaaaccttgccacgccgtcctcttcatttgtggccgtagttcggttggcaatctgcttgaccgcgtcaattccatttcccattgcaacgccgcagcctgcaaattcaagcatttccaaatcgttatcctcatctccaaaagcaatgatccgctccctcggcacgccgtaataatcgctgattttctgcaggccgaccgctttattcatgccgcttttgataatttcaatgacatgccaaggagcggcccatcttctatggtcgatcacctcggcatgcacatccgataaatatgagcgtattgccggcacatcctcttcctttgcatgtatgagtacggacgtcacatcttcaccgagattttcccgcaagtctccgaccgttacatttgttgtgttcatgttaaaggcatctatcaggtgctcatcatggtaatgaaagtatacgtcgtcaatcacttcagcaagcacgttatgtacgttgtagctctcgctgatatccacgagctgtttgacaacatcaagcggcagtgacgtatgataccgtccccagctgtcgtcttgcggatgatggacaaatgctccgttaaaattgacaattggcgttgtcagctccatctgctggtagtacatggaacttgaacgatacggacggcctgttgagatgcagacataatgcccgtcatcttttaggcgctgtatcgtatgaagggtgttttcagatatggttttatcatcctttaataatgttccatctaaatctaatgcgattaaatagggttttgtctccatgaaaagctcctttaaccttagattttgcttgttttgccttacttacagtgtagctttttaccatctttattgtctacatgttacacttatgattatggttatcctaaggaggggcacattgtgatacaaattgagaatcaaaccgtttccggtattccgtttttacatattgtaaaggaagagaacaggcaccgcgctgttcctctcgtgatctttatacatggttttacaagcgcgaaggaacacaaccttcatattgcttatctgcttgcggagaagggttttagagccgttctgccggaggctttgcaccatggggaacggggagaagaaatggctgttgaagagctggcggggcatttttgggatatcgtcctcaacgagattgaagagatcggcgtacttaaaaaccattttgaaaaagagggcctgatagacggcggccgcatcggtctcgcaggcacgtcaatgggcggcatcacaacgcttggcgctttgactgcatatgattggataaaagccggcgtcagcctgatgggaagcccgaattacgtggagctgtttcagcagcagattgaccatattcaatctcagggcattgaaatcgatgtgccggaagagaaggtacagcagctgatgaaacgtctcgagttgcgggatctcagccttcagccggagaaactgcaacagcgcccgcttttattttggcacggcgcaaaagataaagttgtgccttacgcgccgacccggaaattttatgacacgattaaatcccattacagcgagcagccggaacgcctgcaatttatcggagatgaaaacgctgaccataaagtcccgcgggcagctgtgttaaaaacgattgaatggtttgaaacgtacttataaagcactaagttattaacaagagctgaatttacgttatactgtagaaaaaaggagtgagggaacgtggaagaagcattaaaagaaaacatcatgggcgccctggaacaggttgtcgatcctgagcttggcgttgatatcgtgaacctcggcttggtatatgacgttgatatggatgaagatggcttgacgcacatcaccatgacgctaacatcaatgggatgccctttagcgccgattatcgtggatgaggtgaaaaaagcattagcggaccttcctgaagtgaaagacacagaggttcacattgtatggaatccgccttggactagggataaaatgtccagatacgcaaaaattgcgcttggcattcaataaaacaaaaaaggacagcctgacatgtgaggctgtccttttttacagctgaaaggagtgaaaggaaatgatgtacctgctggcagttttatgcccgccgcttgctgttttgttttcgggaaaaccgtttcaggccttgctgaatctcatattgacctgtatcttttggctgccgggcgcgattcacgcctgctttatcgtcgccgaccgccgtgccgaaaaacgggcaagaagataatttggaaaaatgaggacgcagtcatggtataatggtcataaaaacagcagggagagcactatgaaaaagaaattgcttgcattcgcgctttgtactggcgcgtatgcggccctgtttgcgtactctgtgaactcagagcaaaaaacagccacaagcgagatgacggatgtcagccgcctgatgcctgtaaaaataaagcagacagtgaaagggcaggaagaggaaatgctcattgacacagtcaaagaggcaaatcgaaaaaacataaaaatttcaatcgccggggcccagcactccatgggcggccatacatattatgaggacggcatcgttctcgacatgacgggctacaacaaaatcctgtcactcgatcaagagaagaaaaccatcagggtgcaaagcggtgcaacgtggaatgatatccagaaatacgtgaatccatacggactcgcggtaaaagtcatgcagtcacaaaacatttttacaatcggcggatctctcagcgcaaatgcacacggacgtgatattcgctacggctcgctaattgatacagtcaaatcattccggcttttaaaagctgacgggatgattatcactgtcactccaaaagatgatttgtttacggcggtcatcggagggtacggcctttttggcgtgattcttgatgtaacgcttgagctgacagatgatgagctgtatgtcatgaagacagaaaaaatgaattacagcacatactcagactatttttcaaagcatgtaaaaggaaatccagatgtccgaatgcatctggcgcgaatttcaacagcgaaaaaaggatttctgaaagacatgtatgtcacgaattacgtattggctaatcatcaggatcagctgtcctcatacagcgaacttaaagaagacgagtatacgggagccacaaagtttgcactcggcttgtcaagacggtatgaatgggggaggaattggctgtgggacacacagcaatcctatttcctgagccagaacggcacagagatttcacgcaataacgtcatgcggtccgaatcaaagtttcttgagtatgaaaacaatgacaacacagatgttttgcaagaatactttgtgcccgtgaaggagtatgggtcctatattgatgacctgagacaaacgctgtcggacgaagatctgaacctgctgaacattacgatccgctacgtgcagaaaaatgaaaaggccgacctttcctatgcgaaggacgatatgttttcgctcgtactattaataaacgagggcttttcaaaagaagaccaggcagataccgcccgaatcatcaggcgcatgacagacgttgccatcaagcacggcggcagctattatctgccttatatgacctaccagacaaaagcgcaaatgagacaggcatatccgaaaagtgaagcgttttttcagaaaaaacgaacctatgacccggatgagcgctttatgaattacttttatcagaggtataaataatggggaaaaacaaattaaaatggctgacattatcacaaagcagcgtgtttttcgcaagcagcttaatctttccgttttatattctgtttgtgaaaaatatcggctcaagctacacacagttcggtttttcctacggattgttcgggttgagcggagcgcttatttacccgctcctcggacggctgtctgaaaggtttgacagccgttattttctgcttctgaactcgtgggggatggctgttctgcttttatatgtcccgcatatcggaagcgtcgttcaagtgtatatcgtccaagtgctgttagggctctttggagcgatgcaaaagcatggagaaaaagtgctgatcgctaattttacagacagtggagagcgtggaaagaagatcgggaattaccatttttggacagctgtcttttcagcagcagccattatgctcgggggctttctcgctgactttttcacagtgcaaatgattttttatgcaagctctattctatattttttgagtggattgatgatgatgaaaacaggctgacgcggtcagcctgtttttttatgcggctgaaatgcggcaccgcatcaacgtttttgtgctggagtcgtgctgattttttttgagcggaattcccattgaacagaaaatttataaatgaataaaaatattaaatatacgattgaattaatttttattcatgttataatgttaaataatttcacaaagaccaagagggtgaacttgttttgaaaataggaattgtaggtgctacaggatatggaggcaccgaacttgtcaggattctttcgcatcatcctcatgcagaggaatgcatactttattcatccagcggagaagggaatgtctatagcgagggttatcctcatcttaccggcttagcggatcagcagctgaagccgattgatatgaatacgatcaaacacgaaatagatatcatgtttctcgctgcgccgcccggagtatcaagtgaattgactccaaagctggcagacgcgggaattacggttattgatctgtcaggtgatctgaggataaaagaaccggctgaatatgaaaaatggtataaacggacagcggcaccgaaggcggtgattcaagaggcggtatacggtctggcagaactgaatcaactgcaaattcaacaggcgaaactcattgccaatccaggctgttttccaacagctgttttgcttggcctcgcgccattggctcaaaagaaactgctcgatgaatctttcgttatcgttgacgcgaagaccggtgtttccggagcgggaagaaaagcatccatgggaactcatttttctgagctgaacgacaattttaaaatttataaagtcaatgaacatcagcacacgccggaaattgagcaggcgctgaatgaatggcagccaggtctcgggcccattacattttcggctcacttggttccgatgacaaggggcatcatggcgacgatgtataccagattaacctgtgacctaaccgcagatgacctgcatgatttatattcggaattttaccaagattcatattttgtgagagtgaggccaaaaggtcagtacccgcaaacgaaagaagtgtacggcagcaatttctgtgatatcgccgtgaccctcgatgagagaacgaacagagtcacgatcgtctcggtaatcgataatttaatgaagggtgccgccggtcaggcagtgcaaaactttaatttgatgaatggctggaatgaagaaactggactcaccatcacgccaatttatccatagaacgggagagaatcgaaccatgattcagttaagtgaagatcaaattgtaaaagtaacaggtgatgtatcctcgccaaaagggtttcaggcaaagggtgtgcattgcggactgcgctactcgaaaaaagacctcggcgtcattatcagcgagacaccggccgtgagtgcagcagtttatacccaaagccactttcaggctgctccgatcaaagtgacacaagacagcttaaagcacggaccgacactgaaagccgtcatcgtcaacagcgccattgccaacgcctgcacgggagaacagggcttaaaggacgcatacacaatgcgggagagctttgcttcacagcttggcattgagccggagcttgtcgctgtttcatcaacgggtgtcatcggcgagcatttagacatggaaaaaatccacgcggggatcgaactgctgaaagaaacacctgcgggatcaggcgattttgaggaagcgattttaacaactgatacggtgatcaagcagacgtgctatgaactggcaatcggcggcaaaacagtcacgatcggcggagcggccaaaggctctgggatgatacacccgaacatggccacgatgctgggatttgtgacaactgacgcggcaatcgaagaaaaagcgctgcaaaaggcgcttcgggaaatcactgacgtttcatttaaccaaatcacagttgacggagaaacatccacgaacgacatggtattagttatggcgaatggctgcgccgaaaacgagtgcctgacagaagaccatccagactggccggtctttaaaaaagcgctcttgctcacttgtgaggatctagctaaagagattgccagagacggagaaggcgcgacaaaactaattgaagcccaagtacagggagcgaaaaacaatcttgatgcaaacgtcattgccaaaaagattgtcggctcaaatcttgtaaaaacggcagtatacggaacagatgccaactgggggcggatcatcggagccatcggacactccgcagcacaggtgacggcagaagaagtagaggtttatcttggcggccaatgcctgtttaagaataacgaacctcagccattctctgaatctatcgccaaggaataccttgaaggagatgaaatcaccattgtcatcaagatggctgaaggggacggaaacgggagagcgtggggctgtgacctgacctatgactatatcaaaattaacgcgagctatcgcacgtaataaaggggagcgaaatgaagaaaacaatcgtttttaaatgcgggggaagcgtcatccgtgagctgtcggaggaattttatcaaaatctgaaagagctgagggcgtcaggctggaagctggcaatcgtacatggcgggggaccggaaatcacaaatatgctgaaacggttaaatatcaagacagagttttcgggcggacagaggaaaacaacgaagccggtgctggaagtggcggaaatggttttatccggttctgtcaataaatttttcgttgctgagcttgccaaacacggactgcgagccgcgggcatttctggtaaggatggcggtcttttggaggctgattatctagatccggaaacatacggagaagtgggagaaatcaaaaaagtcgatgcgtccatggtgaacgcgctgatggaaaatggcatcatccccgttattgcgccgctgtctatgacaagcgactgcaaaacgctgaatgtaaatgctgatctggctgcttcagcagtcgccggagcgcttgaagccgataagctgatgttcgtcacggatgtcgatggaatcatgaaggaaaagcagcgtctggacgtcctgacccctaaggagattcagatgctgatcaagcaggaagtgatcacaggagggatgatcccgaaggtcaattcagccttgtcagctttatcagatcaggtgtctgaagtcatgatcgtaaacggtaaaggatcattcttcgcagaacaaacctttcaagggacaaaaattgtcaaagcaaaggaggctgtttcatgagcagcttgtttcaaacctacggccgttgggatattgacatcaaaaaagcaaagggaacgtacgttgaggatcaaaacggcaaaacgtaccttgatttcattcaggggattgcggtatcaaatctaggacactgccatgaagcggtgacagaggcagtcaaaaaacagcttgacagcgtatggcacgtatccaacctgtttcaaaacagtctccaagagcaagcggcgcagaagctggcagcgcatagtgcgggagatcttgtctttttctgcaacagcggcgcggaggcgaatgaaggtgcgataaagcttgccagaaaagcaactggaaaaacaaaaatcatcacttttcttcagtcgttccatggccgcacgtatgcagggatggctgcgaccggacaggataaaatcaaaacaggcttcggcccgatgcttggaggctttcactacctgccatacaatgatccttctgcttttaaagctcttggggaggaaggcgatattgccgcggtgatgcttgaaacagtgcagggagaaggaggagtcaatccggcgagtgctgaatttttatcagccgtacagtcgttttgcaaggaaaagcaagcccttctcattattgatgaaatccagaccggcatcggacggacgggaaaaggcttcgcatatgagcacttcggactctcaccggatatcatcacagtcgccaaaggattgggaaacggctttccggtcggcgctgtcatcggaaagaaacagcttggagaagcgtttacccctggttctcacggaacgactttcggaggaaacatgctggcgatggctgctgtgaatgccacattgcaaattgtattccagcctgactttttgcaagaggctgctgacaaaggggcgtttttaaaagaacagcttgaggcagagctaaagagcccttttgttaaacaaatccgaggtaaaggattaatgcttggaattgagtgtgatggcccggttgctgacattattgctgaattgcagacattaggcttgcttgtattgccggccggcccgaacgtgattcggctgctgccgccgctcaccgtgactaaggatgaaatagcagaagccgtcagcaagctgaaacaggcaatcgctcatcattccgctgtaaaccagtgattttttttcgatataaaggcataaaaattcatttttataattaattattcatcaagaggtgggctgttagatggaaggttatttagtgttagaagatgggacatcgttcagcggcgagctggacggtcatgaaaactgcacgggagaagctgtttttttcacaggaatgacaggctaccaggaagtgctgacagatccatcatataagggacagattattgtatttacctacccgctgattggcaactacggcataaatgaaaaggattttgaaagcaagaaaccgcaagtaaaagccgcggttgtctatgaggcgtgtgatcacttttctcattatgaagcggtatacagcctcaaggagtatctacagaaatggaatattccgctgttaacccatgttgatacgagggctgtcgtgaagaaaatccgggcaaacgggacgatgggtgcgacagtcacagcctctaaagaaggagctgagattgcccttcaaccagagaatgtggcagagcaggcttccgcccaggaaatcagcacattcggcgacgggaataaacatatcgctctcattgattttggctataaaaagtcaatcgcatcatcacttgtcaaacgaggctgcaaggttaccgtggtgccataccagcaaatggaggccgtatacaacatcaaacccgatggaattgtgctatcgaacggacctggagatccgaaagccattcagccatatttaggaaagatcaaaagcatcatcagccgctttccgactctaggcatttgtctcggacatcagctgatcgcgctcgcgtttggagggaatacttttaagctgccattcgggcacaggggagctaatcatccggtcatcgaccgtaagacgaaacgggtctttatgacaagccaaaaccacagctatgtggttgatgaacagtcgattaatgaagaagagctcaccatcaggtttcatcatgtcaatgatacgtcagttgaagggcttgcccataaaaaactgcctgtcatgagtgttcaattccacccggaagcccatcccggacctgcggaaagcgaatggatttttgatgattatctaaagaatgtgataccagcaaggagagaaatcgcgcatgcctaaagacaccagtatttcaagcatattagtaattggctcaggcccgatcatcatcgggcaggcggcagaatttgattattcaggcactcaagggtgcatcgcgctgaaggaggagggctaccgggtaattctcgtcaacagcaatccggcgacaattatgactgatgaagccttcgctgatgaaatttattttgagcctctgacagcagaaagcctgacagccatcattaagaaagaacggcctgatgggcttcttgccaatttaggcggtcagaccgcgttgaatttagcggtggagcttgaagaaacgggtgttttaaaagagcacggcgtcaaactcctcggcacatccgttgaaacgatacaaaaaggagaggaccgggaaaaattccgttcgttaatgaatgaattaaaacagcctgtgccggagagtgaaattgttgataacgaggccgatgccctccattttgcggaatccatcggttttcctgttattatcagaccagcttacacattaggcggaaagggcggaggaatcgcccctgataaagaagcctttacagctatgattaagcaggcgctattagcaagcccgatcaatcaatgccttgtcgaaaaaagcattgccggctttaaagaaattgaatatgaagtcatgcgtgacagcaataacacatgcattaccgtctgcaatatggaaaatatcgatccggtcggcgtgcatacaggtgactctatcgttgtggcgccgtcacaaacattgacagacgaagactatcaaatgctgcggacagcaagtctgacgatcatctcagcacttgatgttgtaggcggctgcaacattcaattcgcgcttgatccattcagcaagcaatattacgtcattgaagtgaatccgcgtgtaagccggtcatcggctctcgcatctaaagcgaccggttatccgattgcgaagatggccgcgaaactggcagtcggatacactcttgacgagctgaaaaatccgctcacaggctcgacttacgcaagctttgaaccggcactggattatgtgatcgtcaaatttccgcgctggccgtttgataaattcaaaaacgcagaccgcaagcttggcacaaaaatgaaagccaccggtgaagtgatggcgattgaacggaatttagaagcggcgatacaaaaggcagccgcgtcgcttgaattaaaaaatatcgggacacaccttccagagctcagcgggttgtcaattgatacgctatgggatttggcaatcactccggatgaccgcagatttttcgttgtcatggagctgttgagccgcagcgtctcgattgatgacatccatgaaaaaacaaaaattgatccgtttttccttcatacctttgacaacatcatcaaattggaaaaccgcctgatggaagcagggagcgatctctcttttgaattattgaagaaagcaaaggaaaagggattctcagacgcaacgattgcctcgctgatcagcaaaacagaagaagaggtgcgcgcgcttcgcaaggagatgggcattacgccttcctttaaaatcgtagatacatgcgcggcagagtttgatgcgaaaacaaactatttttactccacatatttcggagagaccgatggagacatcagccgcaaagagaaaaaacgcgcgctcattatcggatcaggcccgattcggatcggccaaggcgttgaatttgattacagtgctgttcacggtgtgctgacactgcaagagcttgggttcgaaaccatcatgattaacaataacccggaaactgtcagcaccgattatgaaattgcggaccgcctgtattttgaaccgatgacaacggagcatattgtaaacgtggcggagcaggaaaatattgattttgcaattgtgcaatttggcggtcaaactgcaatcaatgctgctgaagcgctcgaaaaagccggcattactcttcttggcacatcatttcaaacgctcgacgtgttagaggatcgggatcaattttatcagcttcttgacgagctgggattgaagcacgcaaaaggagaaattgcttatacaaaagaagaagccgcttcaaaagcgagtgagatcggctatccggtgttaatccgcccatcttacgttatcggcggaatgggcatgatcattgttgactcgcaagcccagctttctcagctgctgaatgatgaggacagcatgccatacccgattttaattgatcagtatgtgtctggaaaggaagtcgaaattgatttgatttccgacggcgaggaagtctttatcccgacatataccgagcatattgaacgggcaggtgtccattcaggggacagttttgccattcttcccggaccgtccatcacgagcgggctgcagcagggcatgaaagatgcggcacaaaaaattgcccgaaaactttcatttaaaggcatcatgaacattcaatttgtgatcgacaatggaaacatactcgttcttgaagtgaatccgagagcgagccgcacggttcctgtcgtcagcaaagtaatgggcgttccgatgattccgctcgccacacgtctgctggcgggagcgtccttaaaagatctaaatccggcagttcaaaatcatcatggagttgccgtgaagttccctgttttttcttctcatgcgatccaggatgtggatgtcaagcttggaccggaaatgaaatcaacgggagaaggcatgtgtgtcgcatatgattctaacagcgccttgaaaaaaatctatacaagagtctggagtcaaaaaggaagcatttatttgcaaaacgttccggaagatgtgaaggagttagcagaaaacgcaggttttacaatacatgaaggaacatttgcctcatggatggaacaggaaggaaactcgctccacattaatctgagcggttctgaagaagcacgcaaagaacgtttggaagccatgacgcacggcatccccgtctttacagaagaagaaactgtgcgggcgtttttacaaagcggttcaggccatccgcagcctgtatctctcaaagacctctataaaaaggaagtggcatcatgcacacagtgacgcaaaccagtttatacggaaaagatttattaacgttaaaggaccttagtgaagaagatataaacgccttgctcgcagaagccggtgagctgaaacaaaacaaaattcagcctatattccatggcaaaaccttggcgatgatttttgaaaaatcatcaacgcggacccgtgtttcatttgaagcgggcatggcgcagctgggcgggagcgccctctttctaagccagaaagatctgcagctggggcgcggtgagactgtcgctgatacggcaaaagtgctgtcaggctatgtggatgccatcatgatccggacctttgaacatgaaaaggtggaggaacttgccaaagaagctgacattccggtgatcaatggacttaccgataaataccacccatgccaggcgctggcggatctcttgacgattaaggagataaaagggaagcttaaaggcgtaaaagtcgcgtacatcggtgacggaaataacgtggcgcactccttgatgatcggctgcgcgaaaatgggctgtgatatctcgatcgcttcaccaaagggatatgaagtgttagatgaagcagctgaagcggcaaagacatatgcacttcaatccggctcttctgtcacgctgacagatgatccgattgaagctgtaaaagacgcggacgtgatttattctgatgtgtttacaagcatggggcaggaagcggaagagcaagaacgtcttgctgtctttgcgccttatcaggtgaatgcggcgctggtcagccatgccaagcctgactatacatttttacattgtctccctgcgcatcgcgaggaagaagtgactgcggagattattgacgggccgaactctgcagtgttccagcaggcggaaaaccgtcttcatgtgcaaaaagcactgctgaaggccattttatataaaggggaatcatcaaaaaactgctgagccaaactcagcagtttttttgatggcaacatattcacagccgcttaggcgcatactacagcaaaaaggaaaaggaggaaaaacagtgggacagcagcaccaattccggcccggacagaaagcgcctaataacggtgtctacgtagaaatcggcgagacagggagcatggttaaaaaccctcaaaaggtccatctgtcagcaggggaaatgttccccgaaacatcaaaccacaaccggctgtggacctacaaaagaaagccgtgaccactaaaaaacccaaaacaataaatgttttgggtttttggctttttaatgctggcttgcatttttgttcataggcatgatttctgctaaaaccatgattaagacatacagtacaacagcaatgacagatgatgttttgaaattatacgtaacgctgttcatgcttgcaaccaagtagcatgccatatgtgataaaaggaacgtccaaataaaggcaataatatatcgcacgtttccacctcgtccttctcattctattctaaaagttatcataccatacaaaaagcgaagggggaatccaattttagcagaaagtgaggtgacaaaagagtctgattcgtcacactttaatggtaaaatataaaacgtcaatcagtataatagccaaaaatgtaaaaggctaggactttaccttattcgtttcttttctatttacataagatagcgtgagatgaagtgtgaaaggaggcgggcaagcgatgggaataacggaaagatactttcaactgggaacggagcataatgtcattcatctgccctatcgcccgaacggcttcggcatctttatcttgggggacagaacccactttgtcggacatgattcaagcttttggcagcagcattatggcagaaatcagcttctgagcatgttgatgaatgaaggatacactctttttaacagcaatctgttcggaaggcattggggggcggaaaaagcagtcacctatgccaaacagctgatacattctgtgctgaagcaggaaatcctcaatccgaagattcatattttagcagaaggcatgggtgctctcgtggccgatgaactgcttcgtttttccccggatcatatccgctcagccgcaatgttgaatccttgtctcgatcttcaggcacattatgaatcggaaaaagaaaataaatttttctataagcaatttttgaaagaagtatcgaaaagctacggaatttctgaaaaagaagcggaagcgattcgttataaaacaattcaaagctacccgagcggcgtaccggttcatatatggcagcgtatgaccggagctccatatccctacagcgtacatgcggaagttttcaaggaaaaacagcaaaagcaaggctcaccggtcgacatgacatttcatttatttgagcatccaagcagaatttatgcatcaatttgcaaattctttcatagtcatgaaaaagaattatagagaatataatgacaacagccttctcttttgcggaggctgttttgttttgggaaatgaaaaaccggaagggcggcagatgcaatggaatcaacgctgattgtaggtgcggacgaatttttcggcctttcattatgtgagcgaatgatggatgaaggcatacatgttgacgttgttctggcggaaacagaagataaaatgagacaaatgtacttagaagaaagactcatgtggcttgggagaaatgaactctttcgccagcttgaacacattggagaccaaaattatgatacaatttgtatccagttcggaagttttttgcctttagaccaatatgattctccttatattttagtatatgaagaagaccgaaaagaatgggataaacgtgaaaaaacaggctcggaaaaaaccgtgatcctgccgaaaatgtacgggccatggaaagaagaaacagaggaagacggctattacacaaacgacgtggctgacgagttgctgagattcctgttagaaccaagccgtcatagcaaagatcagctttttgaattgcaagtcacagagaaaacctcaaaagaagaagcaaaaacaaaaattatcgagtggaaaagacaattttcatcaattttcgacaaatattaagaaaaaccttccatgtttcgagttttctagatacaataaacgtataaaaataatacatgttatagcttgtcaaaaggagttgaacatgacttgatcacaaggcttgtcatgatcttttctgtcctccttttattgagtggatgtggacaaactccgttcaaaggaaaaattgagaaggtcggcatgctctttcctgatacgattaatgacctcgtatggggcacaaaagggtataaaggattactgaatatacaatccaaatacaatgtggacgtctattataaagaaggcgttaaaacagaagaagatatcataaatgcgattgaggattttcataagaggggcgtcaatctgctctacggccatgggagtgaatatgctgaggtgtttaacttggtcggcgaagattatccagatatggaattcgtcatttccaatgcgaaagcgaaagctgataatgtaacaagtgtccattttagcggggaagcaatgggcttttttggaggaatgactgctgcccatatgtcgaaaacgaatcaggtcggtgtaattgcttcctttacgtggcagcctgaggttgacggttttatcaaaggggccaagtatgaaaatccggatatagaggtaaatacgaaatatacggatcattgggatgatgatacaacagcagtaaagctttatcagaaaatgaagaacgaaggcgcggatgttgtgtatcccgccggagacgggtataatgttcctgttattcagcaaatcaaaaaagacggtctttatgccataggctacgtcacagatcaatcggatctgggcgagaataccgtattaaccagcacggtgcaaaatgtggacaaggcctatgaaatcattgctgaacaatttaataaaggcacccttgagggcggcgatcattactacgacctgaacacgggagtcgttgagatgggaacattcagcccgctcgtcgatcaagactttcagcaaagaatcgccaagctgatcaaaacatacaacaaaacaggcgagctgccaaaaaacgagtaatggagtgacgtcacatgcagcacgaaaaatcacttgaattcttgcaaattgccatgaaatatctccctgaagcgaaagaacagcttgagaaatcaggcattgagctctcaatggaggccatccagccgtttatgaatctatttacaacggtaatggcggaagcttatgagcttggcaagtctgacgctaaatctgaaacagaataagaagaagccacttttttgaaagtggcttttcacatgattttctttttaatagcggagagcatgggcgcaagctcctttaaagcgggcttgatttgatcaagagagttcataattgaaccgatttggtccataatatgcatgtaattaatcgtctcttcgtcgtttgtctgagaaacctgagaaacttcctcttgctgttcctcctccttctcttctgttggttttgctgcatcgccgaacatcattcttgaaaacacatccaactgcatacgcctcctttccatataccatactctatgagtaagatgaactgatagtttagacgaatatattgccatgtgaaaaaaaataggatagaattagtacctgatactaataattgatcacaacctgattgatcttctaaatttaagatataaaggagtcttccctaatgaaagctggaatacttggtgttggacgttacattcctgagaaggttttaacaaatcatgatcttgaaaaaatggttgaaacttctgacgagtggattcgtacaagaacaggaatagaagaaagaagaatcgcagcagatgatgtgttttcatcacatatggctgttgcagcagcgaaaaatgcgctggaacaagctgaagtggctgctgaggatctggatatgatcttggttgcaactgttacacctgatcagtcattccctacggtctcttgtatgattcaagaacaactcggcgcgaagaaagcgtgtgctatggatatcagcgcggcttgtgcgggcttcatgtacggggttgtaaccggtaaacaatttattgaatccggaacctacaagcatgttctagttgttggtgtagagaagctctcaagcattaccgactgggaagaccgcaatacagccgttctgtttggagacggagcaggcgctgcggtagtcgggccagtcagtgatgacagaggaatcctttcatttgaactaggagccgacggcacaggcggtcagcacttgtatctgaatgaaaaacgacatacaatcatgaatggacgagaagttttcaaatttgcagtccgccaaatgggagaatcatgcgtaaatgtcattgaaaaagccggactttcaaaagaggatgtcgactttttgattccgcatcaggcgaacatccgtatcatggaagctgctcgcgagcgtttagagcttcctgtcgaaaagatgtctaaaactgttcataaatatggaaatacttctgccgcatccattccgatctctcttgtagaagaattggaagccggtaaaatcaaagacggcgatgtggtcgttatggtagggttcggcggaggactaacatggggcgccattgcaatccgctggggccgataaaaaaaggtgaggtgcacacaagatgactaaaaaaagagtagttgttacaggacttggagcattatctccacttggcaacgacgtcgatacaagttggaataacgcaatcaacggtgtgtccggaatcggtccgatcactcgtgttgacgctgaagaatatccggcaaaagttgccgctgaattaaaagattttaatgttgaagattatatggataaaaaagaagccagaaaaatggaccgctttacacaatatgcggttgtggctgcgaaaatggcggttgaagatgcagatcttaacattaccgatgagatcgcgccgagagtcggtgtttgggtaggctccggtatcggaggacttgaaacactagagtctcaatttgaaatcttcttaacaaaaggcccaagacgggtaagcccgtttttcgtgccaatgatgattcctgacatggcgacaggccagatttctattgcattaggagcaaaaggggtgaactcttgtacggttacagcatgtgctacaggaacgaactccatcggtgacgcgtttaaggttattcagcgcggtgatgcagacgtgatggtcacaggcggaacagaagcgccgctgacaagaatgtcattcgccggctttagtgccaacaaagcgctgtctactaatccagatccgaaaacagcgagccgcccgtttgataaaaaccgtgatggctttgtcatgggggaaggtgcagggattatcgttcttgaagaacttgagcatgccctggcccgcggcgctaaaatttacggagaaattgtcggctacggctcaaccggagacgcttatcatatcacagcgccggcccaagacggtgaaggcggagcgagagcgatgcaagaagccattaaagatgcaggcattgcacctgaagaaattgattacatcaatgctcacgggacaagcacgtattacaacgacaaatacgaaacaatggcgattaagaccgtttttggcgagcatgcgcataaacttgcggtaagctctacaaaatcgatgacaggccacctcttaggagcagccggcggtattgaagccattttctctatcctggccattaaagaaggcgtgattccgccgacaatcaatattcaaacacctgacgaagaatgtgatttggattatgtgcctgatgaagcccgcagacaggaacttaattatgttctcagcaactcattaggattcggcggacacaacgcaacattaatctttaaaaaatatcaatcataatcaagccaaaccggctgcccttaaagggtagccggttttttttgtgtgcataggattaaaagaggaggcgatcacatgagtgtagaacaaacatatagctggctcaggaaggccggttcaatagatgatttggcgcattacattatcccgcttttttcaggtgcggagaaaaagaactggaagggcattctggggcatcttcagcatcatgggatgtttaaaaacataaaagagggtattcagacggtttccaagctgaaggaaaaaggtttttacggacatatccaaaaggaagaacagtacctcaaaaacaaatggcaaggtcctgatgtaccaattgttacgctgccggttgatgaacgaaacaggagaatccgtttagaattcggatcaaaatcaggactcgcctttcaagacaaaatgttcctttttctttcgtcagatttagattttgggtcggtatctgcccttatgacgcatgagtatcatcacgtttgccggttaggtcatctgacaaaagaggaaaaggatgtcacattacttgatacaatcatcatggaagggctggcggaatatgctgtttatgagaggttcggccgaagtcaaacggctgaatggacgacttggtatacaccggaacagcttcaggctttatatgaaaaaaagattgcgccccatcgggatatcaaacgggataatcgattatttccccagctgttattcggcaaaggatatcagccaaaaatgcttggatacgcagttggattcaatattgtaaaaaaatatttaaccgccagcaaggcaagcaccgcagacgggctgtccattcctgctgagacctttttggatgcaatgctttaaaaggataaaataatggaatttcattaataatattacatttatcctaaaaaattcttgattttgcaaaatgattgtaataatatacaactataaaatttttcgataattcaatattatttattatttctgaataaagggattgctttctcttgaaaacgtttgacaacaagaggggggaaaggggagctagcatgagcacacttttagaagtgaataatttaaagacttattttttcaggaaaaaggagccgatccctgcggttgacggagtcgattttcacatcagcaaaggcgaaaccgtcgcgcttgtaggtgaatcgggctccggaaaaagcattacttctttatcaattatgggcctcgtccaaagctcaggcggaaaaatcatggacggctctattaaactcgaagacaaagacctcacctcattcactgaaaacgattattgcaaaatccgcggtaacgaagtatccatgatctttcaggaaccaatgacctcccttaatccggtgttaacaatcggagaacaaattaccgaagtgctgatttaccataaaaacatgaagaaaaaagaagcccgtcaacgagctgttgaactcttgcagatggtcggtttctcccgggcggagcaaattatgaaggagtacccgcatcggctgtccggcggtatgagacagagggtgatgattgccatcgcactgagctgtaatcctaaactgctcattgctgatgaaccaacgacagcgctggacgtgacaatacaagcccaggtgctggagctcatgaaagatctctgtcagaagttcaatacatcgattcttctcatcacacacgacttaggtgtcgtgtctgaagctgccgatagagtgattgtcatgtactgcggacaagtcgtagaaaacgccactgttgatgacttatttttagaaccgcttcatccgtatacagaaggcctgcttacgtcaattcctgttatagatggagagattgataaattaaatgcgattaaaggcagtgtgcctacaccggataatctgccgccggggtgccgttttgccccaaggtgcccgaaagctatggataagtgctggacaaatcagccttcgcttttgacacacaaaagcggaagaacggtgagatgctttttatatgaggaagagggtgccgaacaatcatgacagcagctaatcaagaaacaatcttagagcttcgtgacgtaaaaaaatactttccgatccggtcaggcctttttcaaagaaaagtcggtgatgtaaaagcggtggatggtgtttcattttcgttaaaaaaaggagaaacactcggaatcgttggagagtcgggctgcggaaaatcgactgccggcagaacgatgatcagactgtacaaaccgacagagggccaaattctttttaaagggcaggatatttccaatctgtcagaggagaagctgcggaagagtgtccgcaaaaatattcaaatggttttccaagatccatttgcttcgttaaacccgagaaagaccctgcgttccatcataaaggagccgtttaatacgcacaacatgtataccatgcgtgaacgaaacgaaaaagttgaagagctgcttgcaagagtagggcttcacccgtcgtttgccggccgttatccccatgagttttcaggcggccagcgtcagcggatcggcattgccagagcactcactttgaatccagagctgatcattgcagatgagccggtttccgcacttgatgtatccattcaggcccaagtgattaacttgatggaggaattacaggaagaatttaatcttacgtatctatttatctctcatgatctgagtgtcgtccgccatatcagcgacagagtcggagtaatgtatcttggcaaaatgatggaactgaccggcaagcatgagctttatgacaacccgcttcacccatatacccaagcgcttttatcctccgttccggttacaagaaaaagaggttctgtcaaacgtgaacgcattgtcctgaagggagaactgcctagtccggccaacccgccaaaaggctgcgtattccacacaagatgtcctgttgcaaaaccgatatgcaaggaacaaataccagaatttaaagaagctgctcccagccactttgtggcttgtcacctttatagctaatgttgcccgcacagctttgagagggggtatgcacactacataaacaacagcctagaagaacgaacatttcaagagggggaatatctaatgaaaagacggaaaaccgcactgatgatgctaagtgtattgatggttctggccatctttttatcagcctgctcgggatcaaaatcaagcaacagcagcgcgaaaaaatcagcaggcaaaccgcagcaaggcggggatttggttgttggttcaatcggagaacccacactttttaactctctgtattctaccgatgacgcaagtacggatattgaaaatatgctgtacagctttttaacgaaaacggatgaaaaactaaatgtgaaattgtcactcgctgaaagcattaaagaattagacggcggccttgcatatgatgtgaaaattaaaaaaggcgttaagtttcatgacggaaaagaactgactgcagacgacgtcgtatttacgtacagtgtccctttaagcaaagattacaagggagaacgcggttcaacatatgaaatgctgaaatccgtagaaaaaaaaggcgattacgaagtcttgtttaagctgaaatataaagacggtaatttctacaacaatgcgttagacagcacagctattctgccgaaacatattctcggtaatgttccgattgctgatttagaagaaaatgagtttaacagaaagaaaccaatcggttcaggaccatttaagtttaaggaatggaagcagggccaatatattaagctcgaagcgaatgatgattactttgaaggaagaccgtatttagatactgtgacgtataaagtcattcctgacgcaaatgctgccgttgctcagctgcaggcaggcgatattaatttctttaatgtgcccgccactgactacaaaacggctgaaaaattcaacaacctaaaaatcgttactgatttggcattaagttatgtgtacatcgggtggaatgaaaaaaatgaattattcaaggataaaaaggttcgtcaagcgctaacaaccgctcttgaccgcgagtcaatcgtcagccaagtattagatggagacggcgaggtagcttacattccggaaagccctttatcttggaactatcctaaagatatagatgttccgaaatttgagtacaacgagaaaaaagcgaaacagatgcttgcagaagccggctggaaagatacgaacggtgacggcattctggataaagacggaaagaaattctcgtttacccttaaaacgaaccaaggaaacaaagtccgtgaagacatcgctgtcgtcgttcaggaacagctgaaaaaaatcggcattgaagtgaaaacccagatcgttgaatggagcgctctcgttgaacaaatgaatcctccgaattgggattttgatgcaatggtcatgggatggagtttatccacattcccggatcaatatgatattttccattcaagccagattaaaaagggtttgaactacgtttggtataaaaatgccgaagcggataaactcatgaaagatgcaaaatcaatcagtgacagaaagcagtattcaaaagaatatgagcaaatctatcaaaaaattgcggaagatcagccgtatacgttcttgtattatcctaacaaccatatggcaatgccggaaaatcttgaaggatacaaatatcatccgaaacgtgatttgtataatattgaaaaatggtggcttgcaaaataaatttcccttaaaggggagggagagcgttttctccctcttctgtttttaataaggaaagtaaagggggacaagtatatggctgcatatattatcagaagaaccttaatgtctatcccgattttattgggaattacgattttatcatttgttatcatgaaagccgcgcccggagatccgatgacattaatgatggacccgaaaatcagccaggctgacagagagcagtttattgaaaaatacggtctgaatgatcctcagtacgttcaatatttaaagtggctaggcaacatggtgcagggtgatttcggaacgtctattgtcagaaaaggaacgcctgtttcagaattgattatggcaagactacccaatacgctcctgctgatgctggtttcaacgattttggctcttatgatttctattccgttcggtgtcctgtcggcaaagcggccgtattcaaaaatcgactatggcattacatttacctcgtttataggcctggctattccaaacttttggtttggattaattttgattatggtgttatcggtaaatctcggctggtttccaactgggggtgtcgagacactgaataccgaattcaatatatttgaccggattcatcatttaattctgcctgcattcgttctagctacagctgacatggccggactgacgagatacacgagatccaatatgcttgatgtattaaatcaagattatattcgcacagcgagagcaaaaggatttaaagagaacagagtgctatttaaacatggattgaggaatgcattattacccgtcattacaattttcggtttgatgattccttcatttatcggcggatctgtcgttgtcgaacaaattttcacttggccgggattaggaaagctgtttgtcgattcagcattccagcgcgattatccggttatcatggcaatgactgtgatctcggcggttcttgtcgttgtcggaaacctcattgcagacatcctttacgcgattgttgatccgcggatcgaatattaaaaggagggaaacagagatgtcagagctgcaaacaactccctcgccggagatcaggctgaaagaaaatatttcgaaaaagccagaaacaatgacaaagattttctgggaaaaattctcgaaaaacaaactggccattttaggtgccgttattctttttatcattattatgtctgctgttttcgcccctttaattgcaccttatccccaagagcagcaaagcctgcttgataaatataaggcgccgggccttgaacatctgatgggaacggataaatttggacgtgatattttcagccggatcctatatggagcgcgtgtctctttattggttggatttgcgtccgtagtcggttcgattttgatcggaacggttttaggagcattagccggatatttcagaggaatagtggatgctgtcattatgcgtgtagttgacattgtgttatccattcctgatattttcttgttgatcacgctggtcaccatcttcaagccgggtgtggacaaattgattttaattttctgtctcacaggatggaccacaacagcacgattagtaaggggagaattcttgtcgctccgttcaagggaatatgttcttgctgctaaaacaattggaacaaaaacgcacaaaattattttttctcatatcctgcccaatgcgttagggccgattatcgtgtcagctacgctgaaagttgggtctgttattctagctgaatcggcgctaagctacttgggctttggaatccagccgccaatcgctagctgggggaacatgcttcaagacgcacagaatttcacagtaatgattcaagcatggtggtacccgttatttcccgggctatttattttaatgaccgttttatgcttcaactttgtcggtgatggcctgcgggatgcgcttgacccgaaaaatattaaataaaaatgaatatcatatctgttataaaatatcaccaaatcagaaaaaagcaggtctcctttagtcagaaaatatacaaagagatctgctttttatgattcttacataaacccagtgattccagatttcctcaatctctttggaataatttctctatcccttgcctatactgtggacaacagtttttataaaagtgaggggttagagatgttatttcttcatgatgtgtgggtcaattggtttgaaggggaagaaaatggctacaatgtatgccactttcacgaatggcgcaaggaagatacggttgagcttttggatcaggtgccgctgttaagggtgccgtcagtactgtttcattacatagaaaacgatttgtcagagcttccgaaaggtttgcttgaagacgtacatcagaaatcgtacattcgaaaaaatcatgagcggacaaagcttgagtattgttttgtcgtaacagacggaatcggcattttagctgttgacacgatcggctacacgatccctgtcagaaaaagccgtctaatcccaagacaggagcagctcgtttatgaaatggtaaaagatgtagagcctgaaacatatgaatttgagccaaagaagctggaatcctccaaggaatatcacatcttatcattagcaccagaacatgtcagaggactgacaagaaaagaacggcaaattaagcagctgatgtttatggcgcttgaccaattaaaagggctgaaaaaccgagcggaaattggctactggtacacagagtggaatccgcatatgtatgaacaaatcaaaaggatgagctttgaagagatttgggacatgctgtataacgaaacaattgaaggctggtcggacaaacacctagctttttgcgaaaacctaataaaaggacagccttttttcgaaaagctttgggaaatggaaaacgaatcaaaggtcaactgaaaaaaaccgctctttgcaaagagcggttttttgattagcgtctttttcttccaagacccatggcattctccatttttttcagcattttgtttgctgtccgattcgctcgttccgcgccttcatcaagaatccggtctaattcttcagattctatcagctcgtaatagcggtcctggatcggttttaatgcgttcactacgacttctgccaaatcacctttaaactcgccgtagccttttccttcgtactttgcttcaagctcttcaattgtcgtattgccgaggattgaataaattgtaagaaggttggaaacgcccggtttgttttccttatcaaatttgacaatgccttcagaatccgttactgcgcttttgattttcttttcaagctgcttcggctcatccagcaatgtaatataagctttctgattcggatcagatttgctcattttcttcagcggatcattcagagacatgatacgtgcaccgacttttggaattttcacttccggaatcgtaaagatgtcgttgtattttttgttgaagcgttctgcaagattccgcgtcagctcaaggtgctgcttttgatcctcgccgacaggtacaagatccgttccgtacagcagaatatcagcggccatcagcggcggatatgttaacaggccggagacgacagcttcattgcctttggatttgtccttaaattgagtcatccgctcaagctcgccgatataggcgacacactgcatcatccatccggcctgcgcatgtgcggggacctctgactgaataaacaatgttgctttttctggatcaagtccgacagctaagtaaagcgccgcgagattgcggatattctttctaagctcaagccggtcttgaggaacagttatcgcatgctgatcgacgatgcaaaaatagctgttataatcatgctgcagttcgacaaactgcttcattgcaccgatatagttgccgagcgtcactgagccgcttggctgaatgcctgaaaaaatcgtttgtttcatgaaaacatcaacctcatttcttaaaacataataaaaaaggctcattcttcccctgtaaaaaagggacgaatgaaccgtggtaccaccctgattattccattaaaatggaatcactctgacgtttgtaacggagactgctccggctgagcctacttttttccagttcggtcagctgctccaaagtccattccacattgcccgttatctgctcccagcaccgcagactctcttcaaacaggtgaaacgtgtactactctttttcatagcaagcttttcttttgattgcttcattataaatcaattataaccaattgtcatcatgaaaaaacattcttttttccagtaaaattgtaataatataaataacacgagtgctgtaaaatccttaaatgataactgctatcagcgtaaaaacaggcagatattatatgtaaaaagcaatatgggcagaaaacacatgaaaaagtttttaatcaatttatgctttaaatggtagaaggatattatgttcatggaagaaaaactaacgaagtttaaatattttaaattgataaaataatattgcaataaattatttgtttcattataatgaacttgttcactctattgttacagcttttttacaaaaataatcagaaaagacggaacagaataaaagttgtggaaactcaggttcatttgtctgatatttctgaggatttagccgtaaggagctgaaaattattattagggggtttgcgaatatgaaaaaacgttggtcgattgtcacgttgatgctcattttcactctcgtgctgagcgcgtgcggctttggcggcagcggatcaaacggtgaagggaaaaaggacagtaaaggaaagacgacacttaacattaatattaaaactgagccgttctccttacatccgggattggcaaatgattcagtatcaggcggtgttatccgtcagacttttgaaggattgacacgtatcaatgcagatggtgagcctgaagaaggcatggcttctaaaattgaaacgagcaaggacggaaagacatatacatttaccattcgtgatggtgtgaaatggtctaatggagaccctgtaactgcacaagattttgaatatgcttggaaatgggcgcttgaccctaataatgaatcacaatacgcttaccagctctactacataaaaggtgctgaagcggcgaataccggaaaaggcagcctagacgatgtggcagtaaaagctgtgaatgacaaaacgctgaaggttgaattaaataacccgactccatatttcactgaattaactgcgttctatacgtatatgccgatcaataagaaaattgcagagaaaaataaaaagtggaatacaaatgccggagatgattatgtatcaaacgggccgttcaaaatgacggcatggaaacacagcggctctattactctcgaaaaaaatgaccagtattgggataaagacaaagtcaaactgaagaaaatcgatatggttatgatcaacaataacaatacggaactaaaaaaattccaagctggcgaacttgattgggccggtatgccgctcggacagcttccgacagaatccctgccgaccctgaaaaaagacggttctttacatgttgagccgattgcaggagtgtattggtacaaattcaacactgaagctaagccattagacaacgtcaatatccgtaaagctttaacatattcgcttgaccgtcagtcgattgttaaaaacgttacgcaaggagagcaaatcccggcaatggctgcagtgccgcctacaatgaagggatttgaggataacaaagaaggatacttcaaagacaatgatgtcaaaacagcaaaagaataccttgaaaaaggcctaaaagaaatgggcttaagcaaggcatctgatttgccaaaaatcaaattgtcttacaacactgatgacgcacacgcgaaaatcgctcaagcagtacaagaaatgtggaagaaaaatttaggcgttgatgttgagcttgataactcagagtggaatgtctatattgataagctccacagccaagattatcaaatcggccgtatgggctggctcggcgacttcaatgatcctatcaacttccttgaattgttccgcgacaaaaacggaggaaataacgatacaggctgggaaaatccagaattcaaaaagcttctgaatcagtcacaaactgaaacagataaaacaaaacgtgcagagctgctgaaaaaagcagaaggtattttcattgatgaaatgccggttgccccaatctatttctatactgatacttgggtacaggatgaaaacctaaaaggtgttatcatgccaggtactggtgaggtttatttcagaaacgcatattttaaataaggctacgtctgaaaataaaagacctcaaggtatatggggagaaaagccccatatacctttcttactgatggagtataaaaatgtaaaaaccatggaggtgttcccccttgctaaaatatatcggaagacgcttagtctatatgattatcacactatttgtgattgtaactgtgacattcttcttaatgcaagcagcaccgggcgggccattttcaggtgagaaaaagcttccgcctgaaattgaagcaaatttaaatgcgcattatggcttggacaagccgctgtttgtacaatatgtcagttatttgaaatcagttgcaatgtgggatttcggaccgtcatttaaatataaaggtcagagtgttaacgacctgatcagttcaggtttccccgtttcatttactcttggagcagaagctattctcctcgctttagcgttaggtgtattgtttggggtcattgcagccctttaccataataagtggcaggattataccgtcgcgattttaacgatatttggtatttcggttccgagctttatcatggcggctgttctgcaatatgtgttctccatgaagcttgggctgtttccggtcgcggggtgggattcctgggcatacacctttttgccttccatcgcacttgcttccatgccgatggcgtttattgccagactttcccgttcaagcatgatcgaagtgttaaacagtgattatatccgcacagcgaaagcgaaagggctttcccgcccagcggttacagtgcggcacgccattcgaaacgcacttttgccggttgttacatatatgggcccgatggccgcacaggtcttaacggggagcttcattattgaaaccatttttgggattccggggcttggtgcacacttcgtcaacagtattacaaaccgtgattatacggtcattatgggtgtaacggtgttcttcagtgtcatcttgctattgtgtgtattaatcgtagatgtgttatacggcattattgatccaagaatcaagctttccaaagcaaagaaaggagcctaggccatgcagaacattccaaaaaacatgtttgaaccagccgcagcgaatgccggcgatgcagaaaaaataagtaaaaagagcctttccctctggaaagatgcgatgcttcgcttccgcagcaataagcttgcaatggtcgggcttatcattatcgtacttattatccttatggcaatttttgcgccgatgttctcaaggtatgattattcaactactaatctcttaaatgcggataagccgccttcaaaagatcactggttcggaacagatgatcttggacgggacattttcgtccgtacatgggtaggggcgcgaatctcaatctttatcggtgttgcagctgctgttctcgatttgctgatcggcgtcatttgggggagcatttcaggcttccgcggaggaagaacagatgaaatcatgatgcgtatcgctgatatcctttgggcagttccttcattattaatggttatcttactgatggttgttcttccgaaaggtctatttacgattattattgccatgacgattacaggctggattaatatggccagaatcgtgcgcggacaagtgctgcagctgaagaatcaggagtatgtgcttgcttcacagacactgggtgcaaaaacatcccgtcttctatttaaacatatcgtgccaaacgcaatgggttctattttggtcacgatgacactgacagttcctactgcgatttttacagaagcctttttaagctatttgggacttggtgttccggctccgctggcaagctggggaacgatggcttctgacggattgcctgcattgacctattatccgtggcgtttattcttccctgccggatttatctgcattacaatgtttggttttaacgttgtcggcgacggattaagagacgcattggatcctaagttacgtaaataagggagtgatacgggtgacacgcctattagaagtaaaagatttagcaatttcatttaaaacatatggcggagaggtccaggcgatccgcggagtgaatttccatctggataaaggggagacgctggccattgttggagaatcaggttccggaaaaagtgtaacctctcaagcgattatgaagctgattccaatgcctccgggttatttcaaacgcggtgagatcctgtttgaaggaaaggatctggtgccgctgtccgaaaaagaaatgcaaaatgtccggggaaaagagatcggcatgatattccaagatccgatgacctctttaaatccaacgatgaaggtcggtaaacaaattacggaagtgctttttaaacacgaaaagatctcgaaggaagcggctaaaaaacgcgcggttgaactgctggaattagtcggtatcccaatgccggaaaagcgggtgaaccaatttccgcatgaattttcaggcgggatgagacagagggttgtcattgccatggcgcttgcagcgaatccgaaacttctgatcgccgatgagccgacaactgctcttgatgtaacgattcaagcgcaaattttggaattaatgaaggatttgcaaaagaaaattgacacgtccatcatctttatcacacacgatcttggtgttgtggctaacgttgctgaccgggtcgctgtcatgtacgcgggacagattgtagaaactggtacggtagacgaaatcttctacgacccgagacatccgtacacttgggggcttcttgcatccatgccgacactggaaagttcaggagaggaagagctgactgcaattccgggcacgccgcctgatttgacaaacccgccaaaaggagatgcttttgccctgcggagctcttacgcgatgaaaatcgattttgaacaggagccgccaatgtttaaggtatccgatactcattatgtaaaatcgtggctgcttcatcctgacgcgccaaaggtagagccgcctgaagcggtaaaagcgaaaatgcgtaaactggcaaacacgtttgaaaaacctgtcttagtgagagaaggtgaatgaattgactgaaaaactattagaaatcaaacatttaaaacagcactttgtcacgccgaggggaacggttaaggctgtagatgatttatcatttgatatctataaaggtgaaacattagggctggttggtgaatctggctgcggtaaatcgacaacaggccgaagcattatcaggctgtacgaagcaaccgatggtgaggtgctgttcaacggcgaaaatgtgcacgggagaaaatcgcggaaaaagctgctggaattcaaccgcaaaatgcagatgattttccaagacccctatgcatccctgaatccgagaatgacagttgctgatattattgctgaaggccttgatattcataagctggcaaaaacgaaaaaagagcggatgcagcgagttcatgaactattggaaacagtgggattgaacaaggaacacgcgaaccgctatcctcatgaattttccggcggccagcgccaaagaatcgggattgccagagcgcttgctgttgatccggaattcattatcgcggatgagccgatttccgctttggatgtatccattcaagcgcaggtcgtgaatttaatgaaagaactgcaaaaagaaaaagggctcacatacctgtttattgcccacgatttatcgatggtcaaatacatcagtgaccgcattggcgtcatgtatttcgggaaactggttgagcttgcgccggcagatgagctttatgaaaatccgcttcacccatatacaaaatcattgctttctgcgattccgcttcctgatccggactatgagagaaatcgcgttcgccagaaatatgatccgtctgtccatcaattaaaggatggggaaacgatggaattccgtgaagtcaaaccgggacattttgtgatgtgcacggaagccgaatttaaagctttttcatgattcatcaatccttcaagagatttctcttgaaggatttttttgcgtcttcatagaaagtgagaatgataacatttacaattagaggaaaaagcggaggcgaaatacgattcaatttctgcataacaaaaatgtttttgcgctattgctgtctcaatcttttcaatctttagcaggagtcctcgtcacaatcgttttaatggtccggatctatcaaatgactgactccgtttttttggcgggccttattttatcgttcatgtcgtttgcgagtatagcagcaagcttttgcgtctctccggtgcttcgcattctcggttttaaaaaggtgcttgcgggagcgaatctgctgagagcggtctttattatactgatggcatacagcgtcactcatcacggacaggcattcttttggattacgctgctgtttgtgttttgtttttccttcgcgggcgctttttttcagccggcaagatttgcgctgctgccgattattgttccaaagaagcaatatgtaaaagcgaatggtgtgatctccctctcgaatcaattgttcttaacagcaggctggggccttggaggccttctgacgtacgccgtcccttttgaactcgttgtcggcgctgccatttgcctgtttgttctatcgggagcttccatcagtgtgctgcatgtaaatgaagaagaggctgcaggaactgctgaaacagcatctgtcagaagtatatggaaggatttaatgatcatccctattgtaagagacattactgtaatggacatgttagaagctttggcgggttccgtatggtcatctgctattctcctcgcatttactgcggctgttttgcatgaaacagaggtgtggtgggggatgtttaacgcttcctattttataggcgcaattgtcggcagtgtgattgctattcgtttttcttctttttttgagcggaatatgggctatgccattatgttcagctcgcttgtaatgtcggcgctgacccttttgttttcattttctccagtcccatttttatgcgctctggcttgtgctgcaatggggcctttttatcaggtgcgtgatatttgccaggaaaccatgctgcaggaagttattcccgagcagaaacgaatcggaatcatggctgcaaaaaatgcgattttgactccttggtcaggcgtcacctactccattatggggctagtggctgatgctgctggtgcgaaaatagcttttatcgcggctgctgcattatatatcatgacatttctgattgcactggcgcagccccgtctggttcattacaggcgagaaaatcgagttcaatgagaaacacttcaaaatgaacggagcagctggctccgttttgctgaaaaaaaaatgaaaccatggcggaagttcgcacgtctttatagatgtaaggctgtttaaacaagaagaaatggggtatatctaaaagtatgaagacaacgaactcataaggagcaaatcaatgaactggtatgaaaagcttagcgagtactttccaattgaagaaatgaaatcaaaagcgcatatggaagctcttctgaaagagcgaagcgatatttatcataaagatgaaggcaaacatcatattttaatgtttgcggaattcgattcttttatcttcgttgattatctgtatgtgtctaaggatgcaagagggcaggggcttggcggcaaattgatcgcgaagctgaaaaagaaaaataagcccatattgctcgaggtggaacctgtggatgaagatgatactgatacagaaaaacgcctgaggttttatcaaagagagcatttcaagcatgctcagtcaattgggtaccggcgccggtcattggctacgaatgaagtaaacaagatggagattctgtactggtcaccaaaaacagaatcagaagaagaaattcttgaagccatgaaacagacatatgaaaacattcatacttataaagatgagaaatggtacggagaatcgtacgaaaaaacggatgaggtcttggaaatcatcgatgaagaaaaacaaaaaaatattttcgatcagttaagctaattgagaataagaacatatcatgaacattaaaaatttgctggattgacacatttttttcttaggatactgttcacacttacttttttatagtataatacctgtaaagattccttttttagagtaatttcaatttaagaataaaatagatgttcatcctactaattagaggagtgaagatgaatggttacactatacacatcaccaagctgtacttcatgcagaaaggcgagagcgtggctcgaggagcacgagattccatttgtagaaagaaacattttctctgaacctttatcaattgatgaaataaaacaaattcttcgaatgactgaggacggaacagatgaaatcatctcaacccgttcaaaagtattccaaaaactgaatgtgaacgttgaatctatgccgctgcaagatttgtaccgcttgatcaacgagcatccaggtttgcttcgccgtccgatcatcattgacgaaaaacgtttgcaggtcggatataacgaagacgaaatcagacgtttcctgccaagaaaagttcgctctttccaattaagagaagcacagcgtttggcaaactaatagatcgtatcatcaaaagaaggctgagtcatcagccttcttttatttttcaacctgctggtaataaatgctcgcaaggatgacaaacgcaaccgtcaaaatggggaggagcgtttcgactgtgccgtgctgcgccataaaaagcgacagctttttgtctctgacaatcatttctccgccagtataagcaagcagcccgcttcccgcgtaaatcagaagcggtattttctctagtgcaatatggatgagtttgctgccccaaataataaccggaaccgatacacacaatcctataacaacgagagaaaactcaccgtgtgaagctcccgcaactgcgatgacgttgtccagcgacataaagagatctgcaagcacaatcgttcgtatcgctctccacagggaggtgctgcttttaatgtgtttcgtgtcttttttttcaatcagcagctgatatcctaaatacagcaggaaaattccgccggcgcactgcaagaacggaatgttcaaaagatatactgctgcacttgttaatccgattctcatggcaacggcaataaatgttccgagaataatggcttgctgtctttgcttgtccggcaaatgtctgctggccatggcaataacaaccgcgttatctccgccgaggatcaggtcaatcccaacaatgacgagcagagaaatcagatagtcatgctccatgaagcggcacctcgctttcagtccttcgcttgtactactactatatgagacaggtcatattttatgatatcagccgcctgatctgccgttttttaggcaaaggtgcatttttatttcttttgtgactgttttatcataaaatagaaatacaaaggaattcacactggccttggttaaggttaagatgtggacggaatgggtaaagtgtagtaaagtacaattaatcgggagcttagatgtcccttcaacatcttatatagaagggaaggttggcaaatggaaattgaaagaattaacgagcatacagtaaaattttatatgtcttacggagatattgaagatcgcggttttgacagagaagaaatttggtataaccgtgagcgcagtgaagaacttttctgggaagtcatggatgaagttcatgaagaagaggaattcgctgtggaaggcccactttggattcaagttcaggcactggacaaaggattagaaatcatcgtcacaaaagcccagctttccaaagacggacaaaagctcgaactgccgattcctgaggataaaaagcaagaaccagcatctgaggatcttgacgccttgctggatgatttccagaaagaagagcaagccgtcaatcaggaagagaaggagcaaaagcttcaatttgtcttgcgatttggcgattttgaggatgttatttctctatctaaattgaacgttaacggaagcaaaacgactttatattcgtttgagaaccgatattatttatatgtagatttttgcaatatgactgatgaagaggttgaaaatcagctaagcatcctgctggagtacgcaactgaatcctcaatcagcatacaccgtcttgaagagtacggcaagctgattatttcagagcatgctctagaaacgataaaaaaacactttgcatcatagcaaaccgatttccttccggaaatcggttttttttatgcacgaaaatgccattttagagatgtgaaaaatcaaaaacatatagacaagcagaaaatacagcgaacaggagttgatcatcttttccagaaagtatacttcatctggaaaggagagatgacaattgtttagtgctgtgactgaagacggccaaatgtttcaccttctaggcgctcagcaaaaccagaaattaaagcggagacggttcttctgtccggtatgcgggggagagctagctgtgaagctcggacttcaaaaagcgccgcattttgcccataaacagaacaagtcctgcgccatagacatcgagccggaaagcgcctaccacttagaaggaaaaagacagctgtatgtatggctgaaaacgcaacgggcttcaccaatattggagccgtatataaggacaatcaaccaaagaccggacgtcatggcaagaatcaaggagcatatgcttgctgttgaatatcaatgcgccactatcgctccagatgtctttcaaaagcggacagagggcttcaaacaagaaggaatcatcccgcagtggattatgggatacagccgcttaaaacggactgcttcgtccttttatcagctttcaacttttcattggcagtttatcaatgcaagtccatacagagaactgatatgttattgtcctgaaaggcgttcttttctccggctcagccacatcattccattctacacaaaccattcttattcctcagtccaaacgatccctatccatcgggcaggtgcaggcgatctttttttcactgaaccgaaaccctcaattcaatattcaggctggacgaaagcgattcaccgttttcgccataaaccccatcggtttaactcaaaggaaacaaatcgccttaggctgctgttttatgagaaacgacagacgcctttttcttttctgccgactgaagtgtttgttcctgttagaaaaggggcagtttttaagagtccggtttttgtgtggcaggggtttctttatttgtttatgacggatcttggaggtaaacgtgcgccaattcgtttttcagccgttttgcagcagtgcaaactgcacattcataataagaacattgcactcaggtccgaatgcagcgaagagtgtctttcagaagcggttaaacagtatattgattttttgtgcaagaagggatttttaagggagactcagaaagaagtatatgtgctgaatcagcctgcaggaggcatacactccatgcaggatctcatagaaagagaccgcagctgttttatagaatgagtttgtcttatttggctcaccctaagacaaaggtggtgggcaggctgtgaaaggcacaaaaggaaaggtttttcgtgtttttactgcttttttggcattcgttctcttcattactgcatatgatttgacaaaaggcagtgaaaaaccggaagatattcacaacacaagtttattgagaaacagctgttttttcaattggcttgaatcaaagaagacgagggggatcaccatggctgaggaaaaaaaagcaaaccaactgcctgacagaagtgaggtaaaggcagaagacacatggagacttgaggatatttttcctagtgatgaggcctggaataaagaatttcaagctgtaaaagaattaattccgaatttatctaagtataaaggaaagctggcagattcagctgatcatttatacgaggctcttacgtatcaagataaagtgatggagcggctaggtaggctgtacacatatgcgcatatgcgctctgaccaggatactgggaactccttttaccaggggctgaatgacaaggcgggaaacctgtatacacaggccgcaagcgcgacagcttatttggttccggagattttatccatagaagaagacaaactgcagcagttcattcttgaaaaagaagaattgaagctgtactctcatgcgattgaggagattacaaaggaacgtccgcatgtgctgagcgagaaggaagaggcgctgcttgctgaagcctccgaggtactggggtcatcttcaaatacattcagcgtgttaaataacgcagatataacgtttccatccattaaagacgaagatgggaatgaaaaacagatcactcacggcaactttattaatttcttggaaagtgaaaaccgtgaagtccgcaaaaatgcgtttgacgcagtgtataaaacgtacggacaatataaaaacacaatggccacgacgctaagcggcactgtgaaaaaggacaacttctacgcgagagtgaaaaagtacaagtccgcgcgtgaggctgcgctttctaacaacagtattcctgaggaagtatacgataaccttgttaagacgattaataagcatttgccgctcctgcaccgctatattgcgctaagaaagaaagtgcttgagcttgatgaagtgcatatctatgacctgtatacaccgcttgtgaaagatgctgggatgaaggtgacatacgaggaagccaaagattacatgctgaaaggcctcgcacctttaggggaagaatatgcctctatcctaaaagaaggactggaaaaccgctgggtggacgtttacgaaaataaaggcaaacgcaatggggcttattcatcaggagcttacggcacgaatccgtatattttgatgaactggcataataacgtcaataatctctttacgctcgtgcacgagtttggacattccgtacacagctactatacgagaaagcaccagccttatccatacggcaattacagcatctttgtcgcggaagttgcctctacgacaaatgaagcgctccttggcgaatatttgctgaacaatttagaggatgaaaaacagcgcttatatattctcaaccatatgcttgagggcttcaggggaacggtcttcagacaaacgatgttcgctgaatttgaacatctgattcatacaaaggcgcaagaaggcgagccgcttacacctgagcttctgacaaatgtctattacgacctgaataaaaagtattttggagacggcatggtgattgataaggaaatcggccttgaatggtcgcgtattccgcacttctattacaattactatgtgtatcagtatgcgacaggttacagcgctgcccaagcattaagcagccagattttgaaggaaggaaagccggcggttgaccgttatattgacttcctgaaagcgggaagctcacaatacccgattgatgtcctgaaaaaagcgggtgttgatatgacgtctccagagccaatcgaagccgcgtgcaaaatgtttgaagaaaaacttgatgaaatggaagagctgctgatgaaagtcaagcagtcttaaaaaagtaagcctgtgcggaaatgacgcacaggcttttttaaaaccctttaaaggttttccggtgattcaagcggtagagggtaaacaaaatagacagaaacagcagaggagaggtaatataaagcggcagcatatgcatcatgcctaagatattcaagcagaaaaaaacagcaatgcacacaattgagatcaaagtagacatcatggcggtcctcctcgtcctttttccttataaggatatgagtgaatgcacttcgttatgttttgtgacaaaaatatgaacattaagcatagaggttgtcaaaagtcgacatcttttgttatcataaggatgtgaaattgatcacaaacaaacattacccctttgtttgaccgtgaaaaatttctcccatcccctttgttgtcgttaagacatatgaaaccgcgcttatcccggcgcggtttctttagtgctaaaaatggaacgtacgtttggttatggcataaaaaaacagcctcaagcatatgcacgcctgcggctatttttcacatgattgatattcatcagaataagtgctgagagacttccaaaacattccgtgtttggcttccactttggcaacctttttagcaaacgccagttttttcatttctttttctacctcttcaaggctcaggtcatatacaagagcaatttccttcgaggcaacgaagcggaaatattcaataaaacattctaaaggcggtgtttccgacggcttcggctcgtcgccaagcatctcaaataaaatttcttcatatacatcatatgagtagctgccaggaactttaagcccttcatcctcatgctgcgtattaaaaaacgtcagtgtcggattaacagaaacatccatctcggcagcaattttcatgtcacattgaagcgccttgaccgcgctttgagaatgcagatcttttttgaattcttcaagatcgagacttgtattttcagcaatctccaaaagcacgttttcatccgtaatatttttctttgaaacaaataggctctcctgcatatttctgagaaattgcatgccggcttttcgtccttgcagttcggctgctttaaaagcgagagcagccatataaggcgatgaaagcggctgatcctgttcgaaccagacattgccgtcacatgacatgccagagcggctcgcgatcttttcccatgcttctgcgagaagatgcttttttcgctttttatttaaagcggtaaggcttgcggaagcgataatgcgtaaggtgaaaaaacgtccgtatctgattttcagctttttgatgacgggctctaaggaccagcattcaggacataaagggtctacaaacatataaatttcaagcggtttttttggatgaccgtggcaatgggcgaagtatagctcatgctgatagtttgtcaagatgatcgatcctccgcttccgtttgattcaccatatgccttgctgtcaactccagccggccaaacaaaaactcacgaatttcgccctccagccctacatggtccattgcgtccttcatacagctgagccacgcatcagctctctcgtttgtaattggaaagggaagatgccttgctctgagcataggatggccgtgttcctcagtataaagaggaggcccgcctaaatactgagttaagaattgcttctgtttcctggcggtttctgtcaaatcgcttggaaaaatcggcttcagcaaaggatgagacgcgacacgctcataaaaagtatcaacaagttgcgatagaagttcctctccaatcgcttcataaggtgcgttaaacgattgtcccatgttgactactcctttaaatatggctaataggaatcataaatcctattgcaaaaagtaattttctgtatttcattgtttcatctagatttattttagcaacaaggcatcatttctacaaacaaactgccttttatgcgtttgatgactcatttcggctgacagccggggtttgtatttcatatcatatcacataaaaatcaggaatgcgtaagatttcacttcgcaaaaaaaccagagggaaagagcacctctggttacgcgtaataaactgaagttattttttttacatagttttgcgtttcttggaaaggaggaatgcctccgtatcggtcaacattccccggtccggcgttgtaagccgctaatgccatagacacattgccgtcgtatttatccagcatttgttttaaatatttcgttccgccctccacattttgctgcggatcaagcggattggaaacgccaagtgagcttgctgttgacggcatcagctgcatgaggcccatcgcacctgctccgctgaccgcttttgcattaaagcctgattcctgtttgatgacggcgcggatcagtttttcatcaacgccatatttatcagcggcttttttaatcgcactgtcaatagagaagtctcccgaacggatctgatttgcttcatgtttgtttgaagctgaatctgcaacagctgtttcagtgctttctgccgcttttgtgactgaacctgaattgctgctcgtatatgagttaagcccatacgctgaaagcagtgacggcgctgttgtattcgcgctgttcagcatgctgagcgggcttggcgatgaagaaggtgctgattgctgagatgtcagaccgtttgtatattggctgagcaaagaactgaaacttgaaagcgggctttccgtattctgagtgtccgagctgctgcgtgcattagatatggactgtaatgcctgaagctgaagtaatgctgcccaattcgttacattcacgatgtcattccaccttatatagactttcgtttttcttcataaaaacgcagaattttatttttggtttcgcgctgaggaatgctgaattgctgaagcagcttttcgaaggcttgtctgccctcatgccaatccgccgcctcaaattcaatttcatagtcctctttatttaaatatcggctgtggtctaaaactattaagcctttttctgtttctttttccgcacggtttgttgctaaagatccaaagtattgtatggcatccgtatcgatctgaagcttgtgcagctggtccttcacagggccctcgggaactgaaaatccagcgagatctgatacctctgaaagctgctggtgcgtttccagaagccccacatcagccggctcctttaatgtaaggacatactttccgttttttctgcggatacgaagcgcagcatgtttttgtttcagcgcgaagctgtctgtatcaaaataatgattcttttgatctgtaaaatctttttctgtcagctggagtgccgatgctatgtttttgaattcttgtttggtcagcatgtttttaaattcgatttcaatctcttggctcatgatgctcttcctttccgccctgtaaatcttatttttactattatctctttagatgttaggtttatcaatatcgagctcgatatgataaaatgaatctgtactttgtttaaaaaaggagagcattatgcaaaacagaatcgaaattttgaatgcaacattatcggatgatcagcttcgccttgcctgtcagacagaaggaaacgaagcggaacgcaagccgtcaggtcaaatgcttgttgattctgaccactttgcttttgtatacatacttgaattagctgattcttttgaatatgtcattataaaggaacatgtatggccggaactgaagcaggcccatgcacaaaaaataccggttgttttagaggcaggagaccaaacaattgaactggcaggcctgcatgaggagctggaatatcttttagaaaatataaaagataatgcaaactatggagaagaaatggaagaaaaagtgaaacgcgtgtttttatagaaactggttcggaattgggggatgtatgatggatgacaaacaatgggagcgttttttagtgccgtaccgccaggctgtcgaagagttgaaagtgaagctcaaggggatccgcacactatatgaatacgaggacgaccattcaccgatcgaatttgtgaccggacgcgtcaagcctgtggcgagcatacttgaaaaagcgagacggaaaagcataccgctgcatgaaattgaaaccatgcaggacattgctggccttagaatcatgtgccaatttgtcgatgacatccaaatcgtaaaagagatgctttttgccagaaaagatttcaccgttgtggatcagagggattatattgcggaacataaagagagcggataccgatcataccatcttgttgtgctgtaccctttgcagacggtatccggagaaaagcatgttctcgtagaaatacagatccgtacactggcgatgaatttttgggcgaccattgaacattcattgaattataaatacagcggaaacattcctgaaaaagtaaaactaaggcttcagcgcgcttctgaagcggcttcccggcttgatgaagagatgtcggagatcaggggtgaagtacaggaagctcaagctgccttttcaagaaagaaaaaaggaagcgagcaacaataggtaaaggggaagaagagcatgaaatttgccgtatcatcaaaaggagatcaagtttctgatacgctgaaaagcaaaatacaggcgtatttattggattttgatatggaactggatgaaaatgaaccggaaatcgttatttcagtcggaggcgacggaacgcttttgtatgcttttcacagatacagcgaccgtttggacaaaacagcatttgtcggcgttcacacaggtcatctgggtttttatgccgactgggttcctcatgaaattgaaaaacttgttcttgccatcgcgaaaacgccgtatcatacagtcgaatatccgcttctcgaagtcattgtgacctatcacgaaaacgagcgggaagaaagatacttagctttgaatgaatgtacgattaaaagcatcgaaggaagccttgttgctgatgtggaaatcaaagggcagctctttgaaaccttccggggcgacggcctctgcctgtcaactccatcaggcagcacagcctacaataaggcgctgggcggagcgattatccatccgtctatcagggcgatccagcttgcggaaatggcttcaattaataaccgcgtgttccgtacggtcgggtcacctctgcttctcccatcccatcatgattgcatgattaagccgagaaacgaagttgactttcaagtgacgattgaccatttaacccttctccataaggatgtaaagtcgatccgctgccaagttgcatccgaaaaagtgcggtttgcgagattccgtccgtttccattttggaaaagagtccaggattcgtttattggaaaaggtgaatagaaagaggacatatcgtggagcatttttttatcagaaagaacattacttccgctgaggacgggatgactgtaaaagaatatgccggtgaactgggaatttcgaaacgtctgctgaccgatattaagtttggcgggggagacctgcagattaacggtgagcatgtgacggtcaaatacgttttgaaagagggagatcttcttatcgtgaagtttcctgaggagcaggtgagcgagacgctgttggcagagcctgttccgctcgatatcctttatgaggatgaacatgtgcttgtgataaacaagcagccgtatgtgtcatcaatcccttcgagagagcacccctccggcagcattgccaatggaattattgatcattatcaaacaaccggagtgagggcgacagttcatcttgtcacccggttagaccgggatacatcaggtatcatgcttgttgccaagcatcgatttgcccactccattttatcgtctgcgcaaaaaaacggccttgtgaaacgccggtatgcggcagtggttcacgggcggatggcacagatggagggaacagtcgatgctccgattggcagacatcctgacagtattattgaacggacggtaacgccagacggccagaaggctgttactcatttttacgtcacatgtgcaaatgatgacatgacctcggtggcattgcagcttgagactggacgaacccatcaaattcgtgttcatatgagctatctcgggcacccgttgtgcggcgatacactgtacggcggaacgagacaggaaattggccggcaggctctgcacagcgagcatctttcgtttatccatccgctgacacaggagaacatgaggtttcatgctccactgcctcaggacatgagcaaactgataaaaggagagaatcattgattctctccttttttatatggggcgaaatcttgattcgtcgtaaggcagggagcttggaacagagacggtttctatttctggaaagcgaaagcctgtcagttgatttccgaacacgcagcctgtatcaatgttgatggtgcgattgaccttccgaggctctttcacaggtgtatgaccgtataccacccaagcctttccgttataggctgccgcccaatcacgcctgatgggtctgccgtccggatatgtttcacccgtcacgtcaccgtaaagcacaaagtccttcactctgcgggtatatttgccgatatcgtcagctcttatgccagcatgggcgacaactaattctccattatgtaagatgtcgtaaagcggcgctgtttcgtacagcttcataaactgttcgctgactgattttttctcatctttggaaagttcctcaagctctgccgctgttgtttcgagaccatgcatcacttttaccggatttccttttaagtaacgatataatttattgcaatggtttcccgggacataacgcacagcgcctttttcgtaagcgccggctacaaatcggatgacctctatcgatttgggccctctgtcagttaaatctccggcaaaaacaagcaccctgccttcttcatggacaggtactccatttttgattgtatagccaagcttttggattaatgcagtcatttcgtcatagcagccatgaatatcgctgatgatatcgtaagccatgcggtctcctccttaccgattgttttatttattatgaagcaaagtgttgtgagtcatcacaagcttttatgtgcaaattatagaagaagaatcattttctaaacaggattaagaccttatcactttatttttcatcatcacccttgttaaaatcgcgttatgttttttaaaaatgaggttttgttctctgagtgagaactagcataaccctgacttaaaaaggaggttctgattatggcgcatacatctgtcgcatctttagttgttgtacttatcgttgcatttttgacacccatccttttgcatcggtttaaactcagcatcccggttgttgttgctgaaatcattatggggctgataattgggaaaagcggccttaatttagttgtggagggtgacacctggctccagacactctctatgctcggatttatctttttaatgtttttaagcgggcttgaaattgatttttcgtcgtttgagaaaggaaagaaaaagcagttcctgccgaatggcaaggaagcgccgaatacgtttgctgcggcatctgttattttcgtcggtatttttattttatcattgctcttgtcctatgggttcgtcttggccggatttatccaaaatgcatttttgatgaccctgattatttcaacgatttcattaggcgttgtcgttccaacattaaaagaagaacggatcatgaattcgaatatcgggcagattattttgcttgttgctgttattgctgatttggccacgatgattcttcttgctgttttttcttctttatacggagaggacagcggaaacatgtggctcctgatgattctgtttgcggccggagtggtgctttactttttcggccgggtcttcaaacatcgctcttttgttcaatccatgtcaaaagggacgatccagatcgggacgcgtgccatttttacgttaatcattgtactcgttgccctgtctgaatcacttggggcggaaaatattctcggcgctttcttagcgggggttcttgtttccctgctttcgccaaacaaagaacttgttcagcagctggactcattcggttatgggttcttaataccgattttcttcgtgatggtcggtgtgaagcttgatatttggactcttttccaggataaaacaattttaatcatgattccgctcctgctgcttgcgctgttagtcagcaaaatcattcctgtcatgtacttaaagaagtggtatgataaccgaaccattttcgcgtctggtttcctgctgacatcaacgctttcgctcgtgattgctgctgcaacaatcggccagcagcttcacgtgatcagtacaaatatgtcaggagcgctaattttagtagccgtcattgcaagtatttttacgccgatctgttttaaaaaattatacaaacgggaagagcagccggaggagaaaaagacgattacgttcattggcgccaatcaaatgactttgcctgtcacactcgaattgccagaggaagagtatgacgtgcgtgttgtacacgtctaccaagagaatgcggaggaaaagctgtcagaatcagtgtttgctgttgaaacaatttctgactatgaacacgagacgcttgaatcactcggcatttttgaaacggatatcctcgttgtggcgacaggaaatgaagatatgaatgcagacattgcattacttgcaaaagataaaggcacagaaagagtcattgcaagcgtaggatcaccggagcatgaagcagctctgaaggagcagggaatcagcatcttttctattctgctgtcgacaaaaacgctgcttcgcgcactgattgaagcgcctggcgtcatgaagctgctcacgaaccaagagtcttcgctgtatcaaattaatatggagaacagtaaatatgatggtgtcattttacgggaattccctttaacaggtgacgtcatctttgtcaggatcttcagaggtgtggacagcatcgttcctcatggggatacgaggctgaaacttggagaccgtttaattgtcaccggatctcgggggtacgtaacggatcttaagaaaacattggaaggataaatcttgaccaaataaggattcgtgttaatatagaggtgcagaacaattcaatatgtattcgtttaaccactaggggtgtccttcataagggctgagataaaagtgtgacttttagaccctcataacttgaacaggttcagacctgcgtagggaagtggagcggtatttgtgttattttactatgccaattccaaaccacttttccttgcgggaaagtggtttttttattttcagagggggaatgatttgtgaagttttcagaagaatgccgcagtgcagccgcagaatggtgggaggggagctttgtccatccgttcgttcaaggaatcggtgacggaacgcttccgattgaccgttttaaatactacgtacttcaggattcctattatttaacgcattttgcaaaggtgcagtcatttggtgccgcttatgcgaaggatctttatacaacggggcggatggcaagccatgcccaaggtacatatgaggcggaaatggcgcttcatcgcgagtttgccgagctgttggaaatcagcgaggaagagcgtaaggcgtttaagccgtctcctacggcgtactcttatacatcccatatgtaccgttcggttttgagcgggaatttcgcagaaatcttagcggccctgctgccatgctattggctctattacgaggttggtgagaaattgctgcattgtgatccggggcatccaatttatcagaagtggattggcacatatggcggtgattggtttagacaacaggtcgaggagcaaatcaaccgctttgatgagctggcggaaaacagcacggaggaagtgcgtgccaagatgaaagagaattttgtcatctccagctactatgaatatcaattttggggaatggcctatcgaaaagaaggctggtctgacagcgccataaaagaggtggaggaatgtggagcttcacgccataacggatgacagcaagccggtagaagagctagcgagaatcatcattacgattcagaatgaagttgattttattcacattcgggaacgctcaaaatcggcggcggatattttgaaactgctcgatcttatttttgaaggcggtatagataaacgaaaattggtgatgaacgggcgcgtggatattgcacttttctctactattcaccgcgtgcagctgccaagcggcagcttttcaccgaagcagatcagagccagatttccacaccttcatatcgggaggtcggtgcattcactggaggaagcggttcaagcagaaaaggaagacgcggactacgtgctgttcggccatgtgtttgaaacggattgcaaaaagggtcttgaaggcagaggagtatctttgctgtcagatatcaaacagcggatttccatcccggttatagccatcggggggatgacgccggacaggttaagagacgtaaaacaagcaggggcagacggcattgctgttatgtcaggaattttctcttccgctgaacctttggaagcagccagacgatattcccgcaagctaaaggagatgcgctatgaaaaggcattatgaagcagtggtgattggaggcggaattatcggttccgcaattgcttattatttggcaaaggaaaacaaaaacaccgcattgtttgaaagcggaacaatgggcggcagaacgacaagtgccgctgccggaatgctgggcgcccatgccgaatgcgaggaacgtgacgcgttttttgatttcgctatgcacagtcagcgtctgtacaaaggtcttggagaagagctttatgcattatccggtgtggatatcaggcagcataacggcggtatgtttaagcttgcattttctgaagaagatgtgctgcagctgagacagatggacgatttggactctgtcagctggtattcaaaagaagaggtgttagaaaaagagccgtatgcgtctggtgacatctttggtgcatcttttattcaggatgatgtgcatgtggagccttattttgtttgcaaggcatatgtgaaagcagcaaaaatgcttggggcggagatttttgagcatacgcccgtcctgcatgtcgaacgtgacggtgaagccctgttcatcaagacccctagcggagacgtatgggctaatcatgttgtcgttgccagcggggtgtggagcggaatgttttttaaacagcttggactgaacaatgcttttctccctgtaaaaggggagtgcctgtccgtttggaatgatgatatcccgctgacaaaaacgctttaccatgatcactgctatatcgtaccgagaaaaagcggaagactggttgtcggcgcgacaatgaagccgggggactggagtgaaacaccggatcttggcggattggaatctgttatgaaaaaagcaaaaacgatgctgccggctatacagaatatgaaggtggatcgtttttgggcgggactccgtccgggaacaaaggatggaaaaccgtacatcggcagacatcctgaggacagccgtattttatttgcggctggccatttcagaaacgggatcctgcttgctcccgcaacgggcgctttgatcagtgatctcatcatgaataaagaggtcaaccaagactggctgcacgcattccgaattgatcgcaaggaggcggttcagatatgatgctacagctgaacggtaaagacgtgaagtggaaaaaagacacaggtacaattcaagacctgctggcgtcgtatcagcttgaaaataaaatcgttatcgtggaaagaaataaagaaataatcgggaaagaacgctatcacgaggttgagctttgtgatcgtgatgtcattgaaattgtccattttgtaggaggcggatgagcatgttaacaattggcggaaaatcatttcaatcaagattgctgctgggcacggggaaatacccatcgtttgacattcaaaaggaagcagtagctgtttctgagtctgatattttaacatttgctgtaaggagaatgaacatttttgaagcatctcagccgaattttctggaacagcttgatttatccaaatatacgcttttgccgaatacagcgggcgccagtactgctgaagaagcggttcggattgcaaggctggcgaaagcttcaggcctttgtgacatgattaaagttgaagtcatcggatgcagccgttccttgctgcctgaccctgttgagacattaaaagcgtctgaacagcttcttgaagaaggctttattgtgctcccgtacacgtcggatgacgttgtgctggcgagaaagctggaagagctcggcgttcatgccatcatgccgggtgcatctccgattggatcaggacaaggaatcttaaatcctttgaatctgtcgtttattattgaacaggcgaaagtaccggtcatcgtggatgcgggaatcggctcgcctaaagatgcggcatacgcaatggagcttggagcggatggcgtactgctcaatacggctgtatctggcgctgacgatcccgtgaaaatggctcgtgccatgaagctcgcagtggaagcagggcgcctttcttatgaggcgggccgaatcccgcttaagcaatacggaacggcaagcagtccgggagaaggtcttcctgtatgacaggcaggtattcaaggcaggagctgtttgctccgatcggcccatccggccagaaaaaattgaaagaagcgcgcgccgtgattatcggcgccggcgcgctcggaacagccagtgcagaaatgctggtgagagcgggagtcggctctgtgaaaattgccgacagagattatgttgaatggagcaacctccagcgccagcagctttatacagaagatgatgtcaaaaaagaaatgccgaaagcagccgctgcggagcgccgtctccgttcgattaacagcgatgttgatgtgaccggccttgtcatggatgtgacagcagaaaatatcttcgagctgattagggatgcatcgattattgtggatgcggctgataattttgaaacccgcctgatcgtaaatgatgctgcggtaaaggaagggattccttttctttacggtgcctgtgtagggagctacggtcttacctttaccgtggtgccgggttctactccttgcctgcattgcttgctcgatgcacttccgattggcggagcaacatgtgacacagctggcatcatcagtccggctgttttgcaggtagcagtctttcaggtaacagatgcactgaaactgctgacgggagaggagtgcgagccggtgctgcgctcctttgatttgtggaaaaacgagcggtcagaagtgagagcggccagtctcaaacatgacgcatgcccaagctgcggcacaaaggattttccgtttttgtcttatgaaaatcaaacaaaagcggctgtattgtgcggcaggaacacggtgcagatcagatcatctattacgaaagaagcggatcttgaagcgcttgccggtcagctgaggcaggccgggcttgaagtagctgcgaacccgtatttaatttcctgccgctcggatgatatgaaaatggtgctgttccgggacggcagagctttgatccatggaacaaatgatattgcccgggcaaaatccatttatcataaatggattgggtaataaaaggagtgtagtgtaatgagtatatataaagcattgacaatcgccggatcagattcaggcggcggcgcagggatacaggctgatattaaaacctttcaagagcttgatgtattcggaatgtctgcgattacggcggtaaccgctcaaaatacgcttggcgttcacggggtgcatccgctgactgtagagacgttgagacagcaaattgacgctgttgctgaggatttgagaccggatgcagttaagacgggaatgctctggaatgccgacatgattgaagaagtggcaagaaaaattgacgagtacggattcaatcgtgtaattgttgatccggttatgatcgcaaagggcggggcatccttgctgcgtgatgagtcagttgccaccttaaaggagttgctcattccaagaagctacgcgattacgccgaatgtcccggaagcagaaacgctgacaggaatgacaatcagctcgctggatgaccggaaaaaagcagcggagcagctcgtcaagatgggtgcgcagcatgtcattatcaaaggcgggcaccagcctgaggacaatcacattactgaccttctttttgatggcagcatgtttatgcaaatcacccatccttatatcaatacgaagcatacgcatggcacaggctgcacctttgctgcggctttaacggcccaaacggctaaaggagacagcatccatcaggcatttgaggttgcggccaactttgtccgtgaagcggtggaaaatacgctcggcatcggatcgggacacgggccgacaaaccatttcgcttttaaacgaaacagcttaaatacaagccgatgagatcaccagctgatggtgatctcttttgcgtttgctacggtatgcgcttttcatctggacaaggttatgatatgataggaattaagatcaggtactaatactatgtctttattaaatataggaggctttatacatatgaatttttcacttgaaggccgtaacattgttgtgatgggggtagccaacaaacgcagcatcgcctggggcattgcgcgttctttacatgaagcgggtgcacgtttgattttcacatacgctggtgaacgcctggagaaatccgttcacgagcttgccggaacattagaccgcaacgattccatcatcctcccttgcgatgttacaaacgacgcagaaatcgaaacttgcttcgcaagcattaaggagcaggtcggtgtaatccacggtatcgcgcattgtatcgcgtttgccaacaaagaagagcttgtcggcgagtacttaaacacaaatcgtgacggcttccttttggctcataacatcagctcatattctctgactgctgttgtcaaagcggcacgtccgatgatgactgaaggcggaagcattgtcactttgacgtaccttggcggagagcttgtgatgccaaactacaacgtcatgggtgtagcaaaagcttctcttgatgcaagtgtgaaatatttagctgctgacttaggaaaagaaaatatccgcgtcaacagcatttctgccggcccgatcagaacattatctgctaaaggcatcagcgatttcaactctatcttaaaagacatcgaagagcgtgcaccgcttcgccgcacgacaacacctgaagaagtgggcgatacagctgcgttcttgttcagcgatatgtcccgcgggattacaggtgaaaatcttcacgttgattctggtttccatatcactgcccgctaagcaggatctatatcaagcaatcccgaatagggattgcttttttatttcttctgattttcagctttctgtcatatagatagaatatgacacaatcggagggatgaagatgtctaataagaaaagaaacgcggataaaaaaccgctcatgtatattgttcagccggattatgcagaaactacaaggtcatccatgcaggagattgtcatcaaaagaaaggccgacaaacccgctccgccaaaagctgaggaaaagccggcttaccatgagaagcagcaggaggaagccgtggcacaggatgtcctgcaagaagaccaaaagcctgcagccgaaccagtgagtcagcaaacacaagaggcgagagagccagagaacataaaaagccaagaggaacagaaggcagagccgcaggccgtagaagaaaccgttgaacacgagcccccgaaagcagaaaaaaaggaagagcctgcacttgaggcccggaagcctgagaaagaaccggaagctgtccatagtgctgataaagcggaggaaaaagcaccgccggcacgaaaagtgaaaaaaccgatgagcaagatgacgatccacgaaaaaattgattttttaacaaagctgcctcataacatgccgagagcgctttgtttgattgaagccaatggaagaacgtacaggggcgtgattgtcggaagaagaaatgattccgtcctgcttcgaacaaccggaaacggagccccaaccgaactggcaatcgatgatattacctctttgcacccgctcggtttttaacgaaaaagaaaaaagctgcccggctgatgttgccggacagctttttttacatagagaaaagcctgcaggcctgcaagcttttccagcttatgattaatgatgatgtgtacgattgattaatcgaggatttaagcagttgattgcgcagaagcagtctaagtcaacttcaatacagtagttcgttttttcgagtcggaacacttcacacaccgtatctttatcggtgaagtccaaaatgtgtttgtgttcgtcaaatgcgattaataatgacagtgttgcacagcttccatgcactctttcgaccctgaaaaatactgtattaaagcaagggccgttatcgagttcgccgacatttccgaaggcgactaatggcgttgattttgatgtaaatattgcaaaaggcactgtgtcgcctaacgaatggcttacagataaaagcttagagtggcagccggtcgggcagtcttcttcaacagcgttttgcagatcttcaatattttctacagcttcacgcacgcagcttgatgttttctggctcatattatccctcctgccttataaatttgagactggcgaaatgatggagagtcagctgcctcacgctggaagcagctgaatgatttgcacctgtaatagagtttggaaggggattcctctttacaagtgtttatccattgtgatgatgctttttatctttgtgaggcgatgttctgtcaactagctctggtgacaggcactgaatcgcgcagaagcatccgagatccacttcaatgcagaaatctgttttttctagcccgaagaaatccgggtcgcaagggtggcaaacacttaaggtatcgcctttgacatcgaccgggcgtaaaatagacagtgttgcacagcaatcgcataatttttcgacgcggaagaaaatggattcaaagcattgcatatcatccacaaatccccctacgtttccgaatgtggagaacaatccgccttttttatcaaaaacgagaaacggaattgtgtcttttccagcaatcgtagggtttaaaaggttggtatagcagccagtcggacactgttcttcaactgcctcctgctctgctaaaatcttttccactgcatcgcatacacagttctcatgccggccatgggtttttccgcagctcattgatttcagctccttctttatagggtatttgactttagtccttaacaacatatgtacccgtgccccacttggtgtgggtgaacgtctatatattcatcatatgcttggaaaataagaaaaagcagagcgtttttagctctgcttttaggtcctagaggacaagagtgataactaggatggctacgagtgtatttgttgctgtagaaataagggttgcgatatcggcatctactgttgtgacgtttacgccgcgggaacattcgatgagaagtttttggcggtttacttgtttgttagctgtaagctgtaacaaatcttgtgcgactaattcggcaattacgccgtctgcaattgatgtcagagttgccgttacgacagcggcattaagtgctgttacaactgatgttacggcttgaacgtctgtagatgtaacattgatgtcacaagaatctctaataataatcgtttcatctgaaacttgtttgttgagatttgcttgagctagatcttggtcgatgaaggcgttgtcgttgccaaaaaaaccattgccattacagcaaacgtcgcaatgacattttctttcgtgtttttctttatctttctctttgtcatctaacggatggtcacagtcaggatcaagtgcaacccaagaatatggtctgctttccatatctattcctccttttcttttactgttattaaatgagcgagcctcttattttgactgagtcatatatcctgatgaagaaccctattttttatgattggctaattgttatcgtttttccgtctttgtctgatctgttcaatgagctgctctctgcggcttaacggttttgtgttcttttgctcttgtgcggctgcttcttcttttttcttcttttggttttctattagcgcttgtgatttagcttgtaagtcttttacaagatttaagagcatttctttttcttcgtctgatacttttttcattttgtcttttgtgaccccatgtttagaaaatatattttggaccagcattttcgtcattggatcaacttctggaagctttgcaagctcttctttgaatttatcgttatctgacatttgttttcacctcgtcttttaagtttgtgaaaagaaagggttaaaggacgtcaagttcactaagaatgctgtttaacacctgaagcaagatttgtacaaaggttattatctcgtcggcagacaaagtaattttgatgttgcggctgttgataattttaatgatggttctttttttgatttgggagctatcgagaataagaatttcacttgccactgcgtcagccaaatcctcgtcggcgatgacgagctgagtcgccacgataatcatggttgtcacaaaggcttgtatagaaagggcagctgttatatgtgacgtgtcaattgtgatattttcgcaatcaatcacttcgatctgctgttcgaattcgcttgataattgctcaaatattgcagggtgcagggattcgactttttcttcaaatgacataaccttcactcctttcttatccatactctatataatgcaaatggggtgcagagcggaataataaaaataaccaattttctgccggacaagatacaattcatgaagaatagggttttggcatatatgtgaagggatcatgattggcaaaggagtgaacgagtggttataaatgggctgacaattgttcttctatcgcttgcggtctttcggctcgcccgcctgctggtgtttgacacgattatggcgccgcttcgcagtctgtttcatgaagagaaggaagaaaaggatgcggacgggaacattgaaacctatatcgtgattaagggaaccggtgtcagggcgtttattggtgaattgctgagctgctattggtgcacaggcgtgtggtgtgccggctttttgattttatgccaggcggtgatcccgcaagcggcgcagtggctgattttacttttggcgatcgccggccttgccggcattatagaaacgctcgtatcaaaatggctgcaagaataaggcgttaccaccagcaactttctgtcagaatacgcataaagtagcatatatgacataaggaaaggaaggggacaaaaatgaatcagcatcataaaccttcccaaaaatctccatatacagattcatcgtatcaatcaaaaaagataaaaaagaaaggctgcgggtgcggaaataaaaagaaaaagcctcaatagcctggcaaagaaaccggagaactccggttttttgtttttttaacgaggcggtctcgctcagcatatatcataagcggggggataaaagtgaatgagtttgaaaaatggatagaaggaagatatgaaccacatgaacaaaagcaaaaagagcatgaagacacgatgggcagtatcagaaaagacttggatgcatttgataaagccggtctggaatttgaagatgagattgaagagctggctgaaaaaacggaggccttacttaaaaaacatcaagctcaatatgatcaatcgtaaatccgcaaacgccctatgcgaatatccaagccgatcccagcagctcacatagtgtatagagagtaaaggaggtgcttatctatgggctttggatacggattcggcggcggctacggcggcggctgttatggcggttatgctggcggttacggcggcggctatggttcaacatttgttttgttggtcgtattattcattctcctcatcatcgtaggtgcatctttcttttaagatgtattgaggaagtacgggttataacccgtacttccttgccttgtgtttatttttaaaaatgttggaaaagcacattgtattatgtgcattcatacaataccgtattactccgccaaaaggaggcgcattatggataatcaattttttaagaacatcgaaaagaaaacaggtgtgaagatgcaggatgtaatgaatcttgccggatcactccaaaacgctaattttaaagatgaaaatacagtgcgcagtgtgattaaccgcgtagcgcagatggcaaacagacgcgtgccaaaagaattagaagataaaattgtggaatctattacaagcggaaaagaaaagcttgattttggcacgatttctaaaatgatggataataaataagtggatggcctggctgactcactgcagcgggcctttttttacagtaaaaacccggcagtaatctgccgggctgttaatgatgcaagggctgtcttgctttctgtagcaggggatacaaaaatcttgagcggttggctgttttgccgcgcctgttagcagggcaagacaaatataaatgctgtttcgcccgggtcatggctacatataaaaggcgtctttcctcctcaagagcggcctcgtctccttttcttgccgtttctaatgagaaatcgtgcggaatcgagccatctacagtgcctaacacgtagactgttttgaattcaaggccttttgaccggtgaatggtcatcagctgaacgccatgttcatccgttctgtttttctcagcggccctcatatggtctacgtgggcaagaaagtcaggaatcgttttgaacttcttggcgacaaccttgatgtcgcgcaggtcatcagagcctttttccagcttgttgccctcattgccccgcttttttaaatactcggagaagcccatttttccttctgcaaaggtgatggcttctacgggtttcattgtgcggaggcttgcaaaaaacggtacgattttcttgattttgtccagctggaatggcttcagatcaggcaatttggccagcgctttgatcatggtacagtcctctgtaatcgagagcgccttcagcgtattcaaagcggactgttttaaaaacaaggcgggaagcaagtgtttaatcgcctcggtgtcatcctcattttggctggcgtacaagtaggcgagaatctggcggacgatccgtctgctgtaaaacgattggacgccgcggtcagctgtatacggaattgacgattgatgaagcctttcatatatagcacggcctccgctgtttgtgcggtaaagaaccgcaaagtcttctggactggctccattttgaattttttctttgatatcggaaacgaccattgtggcttcttcctcttcatcataaggataaaacagcacagggacctgaatgtcatcgcgggccgcttcaagcgttttggcatatctgtttttgttctttttcacaacgatatcagcactagagacgatcgggtgcgtagacctgtagttcgcagttaaatagatcgtcttcgctcccggataatccttttgaaaatcaagaatgaaagacggattgcttccgcgaaacgcgtagatggactggtcatcgtctccgacacagcacaggttttgctccgggctggcgagcatttgcatgattttgtattgaaccggattaatgtcctgaaactcatcaattaagatatacgtaaaccgagattgatattgttccagaaggtcaggccgctcgataaacaattcatagcaggctgaagccatgtcatcaaaatcaaattggctgtgttcttttttctggcgttcataatgttcatataaacgataaacttgtttttcccactcatcttttagagggatgcgttcatttgggacataagtgtttttccaaaaaccgatctgctgcagggcttggtcaactggggattctttctcatcgatgccttcttcatagagtgcttttttgatatattgttcccgctgccactccattttcagcagatgctcaccgttccatttagcagaattagagtgatacaagatcttataaaacagactgtggaatgttcctgtcacaattcttctgacttttgccggctgtaatccgtactggttcgccatacgctctttcatttcagcgacagcttttgttgtaaaggtgacaagcagcatattttcaggcggtatgcctaagtgttcgatcatgtgggcggcacgggctgtcagtacccgtgtttttccgctccccgcacctgcaagcacgaggagcgggccctctgtttccgtgacagctttcagctgatccgtgtttaaaccgacagacggaaaaaggctcgtatcgggttctattgtttttggcacaaatggtgttcctggtttaatgcttctaggacggtgccattctgtaacagctggggacgggtcagcggcgatcgcttttcccttgggtaaacgaatgacaccagattcctgatcatcttcttttttcccctctttagagggcttcggttcgcacgcctcctcacatgccggaaaatcgcctggctggcgatggataaactctggcggatcggcgatgttaagccgtaacaaaacgggctttccgcaatgagaacaaaataaatgtccttttattccctcttcaaagaggaattgataatgttctctcgaatatgtatgtaaatgtatgattctatcattcagtcgggcgcatttcaaaaaggggtcctcccaatcaaaaggtgttcattacagacaatgactatcatatcaaaagaaatgtgtttcaaaaagtaagtttaagggaaaagagacagcagaggggtgggtattgtatgatatatgcaggtcaaattcagaaccagcaatacgctcaatatgctaatagaacgattggacataagcaggattatgccggaaccgaaaaaatcagctatgtcccgtttcagcgggtatacaaagaactggaaaagcagcaggagaatcaaacggcagctgaaagaaaagtaaacgagatgaaacgtaagcgctctctttataagagattgcgagaaaaaggaatggggacatatattaatcgatatgtataaaaaaccgttcataccagagaacggtttttttatatgcagtaaaaatccggatctcaaaagatccggatgcgttcagtccttcatcatttgtaagtgcggaatgccggcatcgaggaattctttttcagaaagcacgcgatacccgtgtttcttgtaaaacggcacagcctgtgtttgcgcgtttaaaatgaaaccggaagcgcctccgtctgccgcggctttttcgagcgctttcataatgatgccgccgacaccggctgagcggtggcttttcagtacgcaaatccgctctaacttgccgtagccgtccttcatgcgccatcttccggcaccgacaggcttttcaccgtcatacacgacgatatgctctgactcattttcaagttcgtcaatttcttcttcagcaggcacgttttgttctttgacaaagacttcttctcttacatagaatgcatctttcagttgttcttcattttttgcgataactgctttcaaacattattctcctctgcctagcaagaaggtttcatatactgtccacgatccgttttccaactggtagagcaagtggaaacggtcaacgatttcttcatgcgacacttcctgcatttttaattgtcccagcacatctgaatgctcatcgtcggaaagattttggccgaccgtcacatgcggaacgaaattatattcctgttctcctgccaacacaccggtgtatagcttttcattgagtgtttttaactcttccgtcggttctgctttgatgtaaatgacattattgacaggcgcaaatgagctgtattttgtcattttgagaacgagtgggtgggactcttttgcgatgtttcttaaatgtgatacgagctgatccgctttctcctccgcgcattcaaaggatgctctcagcgtcaaatgaggcgggattagagagtagcttgggtcatagcgctttctgtaagagtttgcaaggtcttggagcttttttgatggaaataaaacgattccgtatttcatattatgtccctcctggaaataaagtatgatagagtgttaaagcatttttttcagcgccggggtgatgagcggctgccagtatgtccatttgtggtctccgtcaaatggctcgaaatcataatcggaaagctttttctccagcagctgtttcagctcccggttcggttctgtaaagtccagaatgttcccgtctgtcgtgtggacgtcagtttcttttgttccgatttggtgataaatagagaggtgtttgatatcgtctgactgttttacggcttctagtacgtgtttgtcaacatagggagactgcatgatgatgttgccaaacatattcggataatcaagcgctgtcataagtgacacggttgctccgagcgaatcaccgatcagcgttcggccgtaaccgatctgataggttggatactcatcatctgcaaaaggaacgagctcatgggcgatgaaccgtttataagccgaaaattttgaaccctccggatgataagtgtttctgcgctcttttacatccttatagggaacaccgataataatgctccggtctatttcgcgtttcgacagcaattcctcaacctgtctgccgattctccccagcctgaaataatcgtggccgtcctgcgcgataatgacatggtatttataaagcggggagtagttggacggcagataaacaagcaaggtcatttcctcgttaagctcttttgaaaagaatttcttttcttgcactgtgccgtttttcggtgccataaaaacattcctccaggacatcactatactttcttgcattttcaattattgtaccatgaattattagaaatttctctctttaaacggttcggcacacgaagaaaaaagtgttgaaataaactgtgaattgcgctaatataaaacaatcagaaaattgaaatcgatatttcttatcgtgagaggtggagggactggcccttagaaacctcagcaaccggcttgttttgcatttgcaaagcgccaaggtgctaaatccagcaagcgttttttatgcttggaagataagaagaagcgttaaaccccttcttcttatgaagaaggggtttttattttgaaaagggaaggtgtcagctatatgtcacagcacgttgaaacgaaattagctcaaattgggaaccgtagcgatgaagtcacgggaacagtgagtgctcctatctatttatcaacagcataccgccacagagggatcggagaatctaccggatttgattatgtccgcacaaaaaatccgacacgccagcttgttgaggacgcgatcgctaacttagaaaacggcgcgagagggcttgcctttagttcgggaatggctgctatccaaacgattatggcgctgtttaaaagcggagatgaactgatcgtttcatcggacctatatggcggcacgtaccgtttatttgaaaatgaatggaaaaaatacggattgacttttcattatgatgatttcagcgatgaggactgtttacgctctaagattacgccgaatacaaaagcggtgtttgtggaaacgccgacaaaccccctcatgcaggaggcggacattgaacatattgcccggattacaaaggagcacggtcttctgctgatcgtagataatacattttatacaccggtcttgcagcggccgcttgagctgggagctgacattgtcattcacagcgcaaccaagtatttaggcgggcataacgatctgcttgctggacttgtcgtggtgaaggatgagcggctcggagaggaaatgtttcagcatcaaaatgcaatcggcgccgtcctgccgccatttgattcgtggcttctgatgagaggaatgaagacgctgagcctcagaatgcgccagcatcaggcaaacgcgcaggagcttgcggcgtttttagaagagcaggaagaaatttcggatgtgctgtatcccggaaaaggcggcatgctgtccttccgtctgcaaaaagaagaatgggtcaatccgtttttaaaagcactgaagaccatttgttttgcagaaagcctcggcggggtggaaagctttattacataccctgcgacccagacgcacatggatattcctgaagagatccgcatcgcaaacggggtgtgcaatcggttgctgcgcttttctgtcggtattgaacatgcggaagatttaaaagaggatctaaaacaggcattatgtcaggtcaaagagggagctgtttcatttgagtaaacacaattggacgctggaaacccagctcgtgcacaatccatttaaaacagacggcggaaccggggcagtcagtgtaccgattcagcacgcctcgacttttcaccaatcttcatttgaagagttcggggcatatgattacagccgctctggcacgccgacaagaacagctctcgaagaaacaattgccgcactggaaggcggaacaagaggatttgctttcagttcaggcatggctgccatctcaacagcatttttactgctgtcacagggtgatcacgttcttgtgacagaagatgtatacggcggaaccttccgtatggtgacagaggtgctgacccggtttggcattgagcatacgtttgtcgacatgacggatcgtaatgaagtggcgcggagcatcaagccgaacacaaaggtcatttatatggagacgccatcaaatccgacacttgggattacggatattaaagcagttgttcagcttgcaaaagaaaacggctgcctgacctttctggacaatacattcatgacgccggcactgcagcgtccgcttgatctcggcgtggatattgtacttcacagcgcgacaaaattcttaagcggacacagcgatgtgctctcaggtttggctgctgtcaaagatgaagagcttgggaagcagctgtataagctacaaaacgcgttcggcgccgtccttggcgtgcaagattgctggcttgtcctgcgcggattaaaaacattgcaggtccgtttagagaaagcgagtcaaacagctcagcggcttgcggaatttttccagaagcacccggcggtcaagcgcgtgtattatccgggactggctgatcatcccggcgctgaaacccataaaagccagtcaacgggagcgggcgccgtgctatcttttgagcttgaaagcaaagaggccgttaagaagttagtcgagaatgtgtcactcccagtcttcgctgtcagccttggcgccgtggaatcgattttgtcctatccggcaacgatgtctcatgcggcaatgcctaaggaagagcgtgaaaaacgcggtatcactgatggcctgctccgtctgagtgtcggcgtcgaacatgcagacgatttagaacacgatttcgaacaagcgctgaaagaaattgctccagtttcggttcgttaaaaaagaagccggggatagtccggcttcttttattattgttcgtcatcaggattcagaatcgcgaggacttgatgatcctcccaaacgccattaatttttacattttttcgggcgatgccttctttatgaaatcccgctttttctaaaacacgcatggacccgagattacggggcatcacaccggcttcaatccgatgcagtttcaattcgtggaacgcataatcaacaaccaatctgactgcctctgtcataatgccctttccattatgggctttgtctaaaaaatacccgatgaacgcagtttgcagcgcgccacggatgatttgaaagagcgaaaccgtcccgattaatctatcgtctgacgctgtaaagatgccaaaatgatattcttcatctttctcaagtctttcctgatactcggttattcgttttctttgcccctcaaccgtatagtaatcgtctgcgcgtatcatagaaaactgttcgaaaaaatctcgattttcgctttgcagccccagattttcttcggcatccgttacttctaaaggtctaacataaatggtttttccttttaacatatagtgatctctccgttctcatgtcagcattcctcttacattattctcagggaaatgcaaatatcctttttataagaaggaagaaaaccaatttcccataaaagtgccaacatagttgccgattaagtagccgagcgtaccgacaagcatgatcggggcgacaagctcccgccatcccttggcaattgccatcgcagccgcagtcgtcggtcccccgacagtagcgttgacggcgagcagaatttcttcaagccgcacacggaacaattttccggcagctaaggaaaccgctaaattgctaatcgcaatgataaacacgaataatagaataagaggcgcattcgtgacgattaagcggagatctgcaggaatgccgatcaccacaaaaaacaaataaatcaaaaaggttccaagctcctgagatccattgagcctttcaaaaaaacgcgggaaaagaaaaatgataagaacagttaaagacgtaagaaccaggtactgatcgccaagcgtaccggtcagcaggggatgagaaaaaatgcttttaaaataaccggaaaccttcatactaaccgcaacaagcgcgaaagcggcaccggcattaaaagcgatatcctttaaggaaatatccttccgtttccaatagctttcagcactgtttccgctgtttccatcggcttttaccttctcttcaaacggcatggcataatgccgctgaaaccatttgagtgcaggaatgctgattaaaataaaaaacaaaagcgccatcataaaattatcagccacaacggtagccgacacatattcaccaggcgtctcaaattttgccgccatcgccgcaaagttgaccccgccgccgatataagaggcgctgatcatcccaccgattttatctaagtaaggaatatgctgtttgagtagaaaaaaagccaggatactgccaagcactgttccaacggagctaatcagaaaaataaacagcaaacgcctgctttccttaaaaatttgcctaacattgatctgaaacaataaaagtggtatcgccagcggtaccacataagaccacacagtgtcatacacgggcgactcaacaggaagcactcctacatttgtaaacaccatagcacctgcaagggcgataatagcgcccgacacagcagacgcccacttaaagcgctgctccagcccgatgctcactgccgcccacaccgcaataaacccccataatacccatacatcatcagaagaaatcaaagaatgcaaaaccccatcacctctattgttagaaaattaagacatattataatagccggggaacggaacagcaagtccaaaaaaagtttttctaaaaaagcagttgacgaatagaaggtaaggttatataatagaacttgtcagaaagataacaacatacccagcaacacatacatatcatgattccgtagctcagctgggagagcgctaccttgacagggtagaggtcgctggttcgagcccagtcggaatcatagcttaaacccttgcgcagcaagggttttttactttgcgttaataaagccggttcgtcaaattcgtgagttgttggcgaactgttggcgaaattcattgaccgcagtccaaaaactacctccaaacttacttgattagttcaatagtaacaaacggaagatcggatttctgttaaatcttcattgagaatagccagtccaagaccgtcacttcagccatgcatcttttaaatgaaattttgtactgaaaacatcaattgtatttttaaattctgctctagaatcagcccctttataataatcttgataaattgcttggggtgatactgattcgtgatttgtgctatggtttgcaaggcttgtagcaaaagcaggagcaacagtaacgagtaaagcaagggataatgcaaaaccagttaaagctttttcaatttcattttaagcacttctttttttaaaatacaactttattattaaatggaatacaaaaacatccaaggtgtttttttgttagtaagttgagttagggggattggatggcacttagaatattgtttctgctgatgggatgttgattctggatatatttccaacacgattacaggccggacatgaaagcgaaccttgctttgatcggggcaatcatttcatttacggctgcggtttactttaaagatattgatgtattgagagaagagggaaaacaaatgaacggaatttctgagcgttggaacacgtttaaattacaaaaatcccctgaaccactctagatcaggggattgctttcccaacagcttattaagtagcggaaggcatgatcaacgatttagtatcaatttattaattgcgaatactagaaacataccgttttccgccttccttagaagtaacatattctcgaggaacattaagtctattggtagaatgataacttacataaagtttcatatttgctcggctcgttacgatagccgtatgatccatccaaccatcagcatagcgaagacctattttattatggtaatcatagtgatatacatctccaagctttacatttgaatatgtatcagaaacagtcttcatttttattccgccagcttttaaaatgtatgatctaaaggctcctgcattaacccaagcatctgtatagggtttccattctttaaagtacggcattcttccagctcttaatgcttgggaaacaaagttagtacaatctttgtctttataatatttatagtttttatttggttttaaggcatatttttctgcatatttcattgcagcgtaaccactatatcctttaacagatgttgcagtcacagttagttgattagagttagcagcattgaagttcatacttactggtttatcttcacttttcacttcttctttatcatcatttttcacttcttgcttataattttttaaaaattcatctaatttaacatccgaagaatattcttcatcattttcatattgtagagttgaagaagaattatttaattgtgttacatttagttgcttagaagaattactcaatggtattacatttagttgattagaagaatttttaacttgagagaaacttagattagaagtatttgttgattgagaactttgtttattagaagttgttttgggaatttcaagtttaatattatcgcccagagatgttgttactttttcaacaccaaaaacaaagtttcgagtaatataagcttcaacaattagcttattgtttttttcagaagtcttaacatcgtctatatcgtatgtaaactcgtggaatttttgtttgtccactttacttaacgcagaatacagtaagactccttcgtcggaatcagtcaatttagactctttaggatgcgctaaaggagtgttgtgttcaaaatcatatttttgttgttctaacatatccttaactttttcgtaaccaatctcgttggtaattgaaacattttctttagtctctttattagtagtggctgcaaaaacttcatttgttgacactaatggtgacaatgatagacataaaactagtgaagcaagtaattcttttttcatacgaaacctccaataaaatctaaatataagtaatatttatcatttacaccaattgaaatatggcataaaatacatgtaataatataacataaaaataaatacataaaaaggtatcggaggaaaaaatgaaaaagaaaactaaaattatactttctctcttggcagcacttattgttatattgatagtacttccagttctatctcctgttgtctttacagcttcttcggaaaaaggagcaatcagacacgaaatttataaaagaggatatccctaccaaagctactttgcagttctccagaaaagagaaggagacaatgaatctgggaatctttattatgtaaattggctagattggaaagatgaaacagggcaaactcctcacttatgctattcgaaaaaatcatcagatggtgaatacgaagtaagttgtggcacagggccgtaaaaataaattttaaaattgaataagtccaagacggaaagcctgcggacactgatcgttttacagagaaatttgtgcttcgatcggtgtccgttttttttcgcaactaaccagatgtctatcgcgattactagctatgaaaggagtaattagacatgaaacagtccaaaaagaaaccatcacagaagcaacatgagcgcttagatcgtttctggcaacaaatgatgaacactaacatgcaaacactcagacgtggcaaaggcggcgcttataaacgcagaaagtaaaaagggagtttgaggatgatgaaaaacggattcgcttataaaaacggaaagcttgtgaatatcttttgcggcaaagaagagctctataacgagttgaaagccttcttggtcaaaaccttcagtatcaacgtgaaagaggtatcgaggccctcaatatatcgcagaacaaaaagcaaacaactggaatgacacttactctatttaactatcaggagggaaagcactatgacagatcaaatgattgcatgggagattgaggaatggattcgtgattataaattcatgctgcgggagatcaaaaggctcaaccgtgtattaaacaaagtggattttattagcacaaagctcactgcaacatacggggaggaagcgggcatgccaaggggatcagcaggcgtcagtcaggcagaattgcggcagatggaccgaagagaaaggcggcttcacaaatatgaatctattgtgcattacctggacaatgcaatggaacacattgaagaagaaaagcaccgaatcgtttacgattgcatgatggaaggcatgagctacactgctattgcaaaccaccttgattgctcccgggataccatcagaaagatcaaaacagccataatcggcaacatcgtcaataaagtcaaagaagccaactttctgcaatatttgaattcgtttaaatcggcggtgtaaaatggggggcaggatcggcgcggcggattattcctgcgtcaccaccaatttcatacaatgagtaaaacctcccagtggtaagcgaggatcaactcaactgggaggtcttacatagtgaatcggtgataaaacagcagcagtattgcgtacatgttaatatccccgacaaaatatgtttttttcaacagattcgttcgacaaattttgcaaattgttaatcgataacttttcattcccgatattaaaaatgggagtgaattgtaaaatgaaaaaacagaaaaataataaaaagaagaatattgaaaagcgaaatattgaaaagcgaaatattgaagagaagaataatgaggacttagaagaactggaaaatgcgatttatacttatcacaaaaaggagctacttgctttctttcttgaaaaaactcgaattggtcatgataaggaagaatacaaaaggttccaatctcttctttataagttggatattgaatgtttagaatttgctatatcgagattttctcatatagatattatccatgatcattcaaaatatgttccagcctttatccctttatttgcagcatatctcaccatgttctttaatttttatgaaaaacattggggagctttatcttttgctgctggtacaattgctgctattgtttggataattgcagtagaaagaaaacatagaaatcaagcaatttctattatgaaaatatttgaacaagtcaaagagagaaaagtgaaagacagatctaaagactgaaaggagaaaatatgaataaggataaattaaggtatgcaatcttaaaagaaatttttgaaggtaatacccctttgtcagaaaacgatattggagttactgaagatcaatttgatgatgctgtgaactttttaaaacgcgaagggtatatcattggggtccattattcagatgatagacctcatttatacaaattaggacctgaactgacagagaaaggtgaaaactacttgaaagagaatggaacatggtctaaggcctataagaccattaaagagattaaagattggattaaataataagagcatcctgcggggtgctttttttgttccctgtaaactgcttccggtaagtctcaggatagacaattggcggttaacggcttgagcacggtggtggtttagagggaatatcttttccaaaacaacacgaatcagaagggggcggcggtgaatgtagatggccgaaaagcacattcaggcgtataaggattacgtcaaaggcatgaaatacaaggaccttgccgagaaatacggggtgtcagtgaacaccattaaatcgtggaagcagcggcatggttgggaaaggaaaaagggtgcacccattgaaaaaagtgtgcacacaaaaaaaggcgggcaaccgggcaacaaaaatgcattagggaacaatggcggcgcaccacagaagaatcaaaatgctgtgactcacggctttttctctaaattcttgccagaagagacgcttgaaatcatggaagagattcaggagcgttcgccagctgatatgatatgggatcagatacagattcaatatgcggccattcttcgggcgcaaaagatcatgttcgtttctgataaggaagaaatgatcaaagagctgaaaaagaaaaggtccctcatatctgaggtcagcgaaattgaagatgggcttgtcattagttttagtacgtggtttcgctacagactttacagtgaaacaaacacctaacacatttcacattgcttcagattgccttcaaacttgataatataacttctaaaccttcctataaaatgaaggttttttatttgatttcaatttttaaatcctttacatacagcgattgattaactcgagcaatcaatgtcgcagttatatttatttttcaagaaaatgttataatgaaaagccataaaatgatgggagggggaatttcgatgcattacataacggcatgtttaaaaatcatcagtgataaagaccttaatgagataatgaaggaattcaaaaaacttgaggaagaaacgaacaaagaagagggttgtattacattccatgcttatccgcttgagccatcagaacgtaaaataatgctttgggagatttgggaaaacgaagaagctgtgaaaatccatttcacaaaaaaacacacaatagacgttcaaaaacaagaattaacggaagtagaatggttaatgaaaagcaatgtgaatgattgaaaggctctttaaaaagagacattcaatgacttagtatcagccacttgtgactaagtagtaaattgttgtccaactcttattttttctatttaatattttttgagacgaaaatgtttttttaagctgattttaaaatgtattcaaagtcagctctgtttgatttaatggattatattatttggatagcttgttaccatcataatggagatactccttataaattggaggttaaaataatgagtcattctcaagaaaaaattgcactaattacaggagcaagcagtcaaggggatattggtacggctatttgtcgtaagttagcctcacagggtatacatatcttctttactcactggaattctgatacggcctggatagaagaatttcaacaagaaattttacgtatgggtgtccgctgtgaggcaatgaaaattgatttatcagatgcacatgctgcattcacaatacatgaaaaaatttcagataaattaggatatccttccatccttattaataatgcagctcattccgcaagtgataattatgtatcgttagatgctaaatcacttgatgagcattatgcggttaatatgagatcgaattttcttctttgtgttgaattcgcccgtcggtttaaaaaatctaatttaatatcaggaagaatcatcaatatgacatcagggcaggatttaggtcctttgcctggggagttagcgtatgcagcaactaaaggagctatttctgcatttactaggtcgttatcacaagaacttgcaccattgggcatcactgttaacgccgtaaacccaggtccaacagattctacatggatgacagatgaaataagaaattttctttcacctaaatttccaatggggcgtattggcacaccagatgatgcagcacgaatgattgcctttcttgcaagtgatgaggctgaatggataactggacaaattattcattcagaaggtggatttattcggggctaagctaatgaaacacggtatacaccaatgtatgatgtattcccaaaactaaatctaaacttgaagcgaaaataaggtcccttctctttttagagggggaccttattttattcatgcatgttttgcatccagaaaatctggcggataaagattaataaaccgttacatatacttttccgaatactgcagtacctttaaacaaagtaatcgtggctttcccttttgatttagccgtcactaaaccattttgatcgacttcagcaactttttggttatcagtccaataacgagtagctgaattatttttaacagaataggtttctccaacttttagaggtaaattatagtcttgaatcttgataacatgtgtaggtgaaatagaaatgttctttacttcagtaggtgtggagtttatttcatgagctgaagctaccccgctgaccgacagagctaacgcagaaatcgataaagcagaaacaaccgtttttttgaaattcattttgaaacactcctttaaagttttttgtcttgcactataacaattcaataaaagtaattattttccttgtaaataaatgttaataatatgtgaacgatcaattgatttgagctaagaatattgtgtgccctgcacagagtttgtatttatgatggaaaattgctgagagagaatggccatccttaaaatgttaatagcacacatttgatgggtattagtttgttgagcgtgtggaaattttgttacctgcactttatccccgaagataccaaatcacttttcttcatcatgttcttactttcgtactcatacattagaaaatcttcgttctaaataggtgaagaattggagtatttttatgaatttctgctgaatatacattacatagcaaactcaaagagtataaaaatcgcttttttccggaagcttcggtaaaaaacgaaacttttgtctctatgattttgttttataatgtaaacggtttcttatatagtatacttatactatcaatttgctcaagtagatactgacaggaaggatagaaaaacagatggaatacataaatacaagacaaaaagagattttgtatctgttgttatctgaacctgatgactatttagttgtgcaagatttcgcagatagggtacagtgttctgaaaaaacaatccggaatgatttgaaagtgatcgaggattatctcaatgagcattctcatgcacagcttattcgaaaaccagggttgggcgtttatttacatatagaagaacaggaaaggacctggctaagccaacaattacatactgaacatttttcttctaggcagcggagcgataaggaaagaatgctgcacattgcttatgacttattaatgaatccgaagcctgtttccgcaaaagacattgccgctcggcattttgtcaatcgatcttccattaaaaaggatttatacgcagtagaagagtggctgaagcgttttgatctcacactggtttctaggcagcggcttggattaaaggttgaagggaacgaaagaaataaaagaaaggcattggcaagaatatctgatttgattcacaatacagcgtttaccagccaatttattaaaagtaagtttttacattatgaagtagactttgtgacgaaagaaatcaaatcactacaaaaaaagcattccctctatttcacagacgaaacgtttgaaagtttgttgctgcatacattgttaatggtccgccgcatcaaaatgaagcagccgatttcattgtccccaaaagaaatggcggcagtaaaaaagaagaaagaatatcaatggacatttgcttgtttacagcggcttgaaccggtttttgcaattcgcttccctgaagaagaagccgtgtacttaacattacatatattgggcggtaaggttcgttatccattgcagacagaagagaaccttgaaaatgctgtgcttcctaaggttgtagggcatttaatcaatcgtgtttcagagctgaaaatgatggattttcacaaggatcaggatttgatcaatggtttgaacattcatctcaatactgtgctacaacggctgagctacgatctttctgtagcaaatcctatgctcaatgacatcaaaaagatgtacccttatttgttccacctcatcattgatgttttggaagacatcaatcaaacttttgatcttcatattcctgaggaagaggcagcatatttgacattgcattttcaggcagcgatcgaacggatgcagggcagcagcgagacacataaaaaggcggttatcgtctgccacatggggattgggatgtcacaattgctgcggacaaaaattgaacggaaatatcaccaaatcgctgtaatggcttgtattgcaaaggccgatttaaaggattatatcaaaaagcatgaggatattgatcttgtcatatccaccattgcgctggagaatataacggttccccatattgttgtgtctccgcttttagagcctggcgaagagaagaaattaagtgcgtttatacgtcagctgggcgaatcacaccgccaaaaacaaaaaacgtttcagatgctgaacaatacgactccttttttggtttttttgcagcaggaggcggagcatcgctacaagttaatcgaacagctggcgacagctttgtttgagaaaggctatgttgataaggactatgcggttcatgcggtgatgagggaaaaaatgtcggctacaaatattgggtcaggcattgccattcctcatgcaaacgctaaatttattaaacaatcagcaatcgcgattgccacattaaaggagccgcttgaatggggaaatgaaaaagtttcgctcgtttttatgctggctgtcaaacacgaggatcaaactatgacaaagcagctgtttagcgagctttcatatcttagcgagcagccggccttcgtccagaagctgacgaaagaaaccaatgtcatgacatttttatctcatttggattattaaaagcagggattattccttgctttttttgttatagggaaaaatgcctttattaccggaacctatggtaaaaaaagcgattttaatgagctgatttcggtatacagttgagacaagatcttattattcacactttaaaggaggtttcctatgaaactgttagcgattacatcttgtccgaatggaatcgcccatacgtatatggcagcagaaaatctgcaaaaagctgctgacagactgggcgttagcatcaaagttgagacccagggagggattggtgttgaaaataagctaaccgaagaggaaattcgcgaagcggacgcaatcattattgctgcagaccgttcggtaaacaaagaccggtttataggcaaaaaactgctgtctgtgggggtacaggacggtatccgcaaaccggaagaattgattcaaaaagctcttaacggggatataccggtctatcgttccgctacaaaatcggaatccggtaatcatcaggagaagaaacaaaatccaatttaccgtcatttaatgaacggcgtttcatttatggttcctttcattgttgtcggcggattattgatagcggttgcattaacgcttggaggggagaaaacacctaaaggcttagttattccggatgattccttctggaaaacgattgaacagatcggcagtgcttcattttcatttatgattccgattttagccggctatatcgcctatagcatcgctgataaaccggggcttgtgccaggtatgatcggcggttatattgcggcgactggaagtttttatgacagcgcaagcggcgccggattcctcgggggattattgccgggtttttggccggatacgcggcactttggatcaaaaaattaaaagttccaaaagccatccagccgattatgccgattattattattccggtgtttgcatcactgattgtaggtttagcgtttgtgtttttgatcggcgcgcctgtagctcaaattttcgcctctttaacagtttggctggcggggatgaaagggtcgagctcgatccttctggcattgattttaggggcgatgatctcatttgatatgggcggtcccgtaaataaggtggcgtttctgtttggatcggcaatgattggagaaggaaattatgaaattatgggaccaattgctgtcgccatttgtatccccccgattggccttggcattgcgacgtttttaggaaaaagaaaattcgaggcatctcaaagagaaatggggaaagcggcatttacgatggggctcttcggcattactgaaggagcgattccatttgcggcgcaggaccctctgcgcgttattccaagtattatggcaggctcaatgacaggttctgtgatagccatgattggcaatgtgggagacagagtggcgcacggcggacctatcgttgcagtgcttggcgcagttgatcatgtcttgatgttttttattgctgtgattgcaggatctcttgtcactgctctgttcgtcaatgtactaaaaaaggatattacggcgtctcctgtgctcagtgaaactgcaccgacctccgcgccaagtgaagctgcggcagcaaatgaaataaagcagccaattcaaagccaaaaagctgagatgtcggaatttaaaaaactgacagacattatcagcccggaattaattgaaccaaatttatcgggggaaacgagtgatgacatcatagatgaattgattcagaaattgtcacgaagaggtgcgctgctttcagagagcgggtttaaacaagccattttgaatcgtgaacaacagggaacaacggcgattggcatgaatatcgcgattccgcacggaaagtctgaggcggtcagggagccgagtgttgcctttgggatcaaacgatcaggcgttgattggaatagcctggatggatcagaagctaaattaatctttatgattgctgtaccgaaagagagcgggggaaaccagcatctcaaaatactgcagatgctatctcgaaagctaatggatgacaattatagggagcggctgctctccgtgcaaacaacagaagaagcatacaagctgctagaagaaatcgaataaagcgggggattttcatgacgactgaaccgttatttttcaagcctgttttcaaagaaagaatttggggcgggaccgctttagctgattttggctataccattccgtcacaacgaacaggggagtgctgggcttttgccgcgcatcaaaatggtcaaagcgttgttcaaaacggaatgtataaggggttcacgctcagcgaattatgggaacatcacagacatttattcggacagcttgaaggggaccgtttccctctgcttacaaaaatattagatgctgaccaggacttatctgttcaggtgcatccgaatgatgaatatgccaacatacatgaaaacggtgagcttggaaaaacagaatgctggtacattattgattgccaaaaagatgccgagattatttatggccacaatgcaacaacaaaggaagaactaactaccatgatagagcgtggagaatgggatgagctcttgcgccgtgtaaaggtaaagccgggggattttttctatgtgccaagcggtactgttcatgcgattggaaaaggaattcttgctttggagacgcagcagaactcagacacaacctacagattatatgattatgaccgaaaagatgcagaaggcaagctgcgcgagcttcatctgaaaaagagcattgaagtgatagaggtcccgtctattccagaacggcatacagttcaccatgaacaaattgaggatttgcttacaacgacattgattgaatgcgcttacttttcggtggggaaatggaacttatcaggatcagcaagcttaaagcagcaaaaaccattccttcttatcagtgtgattgaaggggagggccgtatgatctctggtgagtatgtctatcctttcaaaaaaggagatcatatgttgctgccttacggtcttggagaatttaaactcgaaggatatgcagaatgtatcgtctcccatctgtaacatggcagggcttgagaaataaatttgcgagtgaagacgcctattctccagcaatgatctaaataaaataagagtttaatagttggagaagaaatgttacactcttttctgtatatggtaaagaatgaaaaaacacgattcggttggtagtccggatgcatgattgagaatgtcagtaaccttcccctcctcgggatgtccatcattctttaatatcttttatgaggagggaatcgttatgaaattaacgatttactacgatggtcagttttgggtaggcgttgttgaagttgtggacaatggaaagctaagagcctttcgtcatctttttggcaaagagccgagggattctgaagtattagagtttgttcataaccaacttttgaatatgatggcccaagctgagcaggaaggagtgcgtttacaaggcaggcgtcaaaaaaagatcaatccaaaaagattgcagcgccaggtttcaaaagagttgaaaaacgccggagtaacttctaaagctcaagaggcgataaagctagagcttgaagcaagaaagcaaaagaaaaaacaaataatgaaagaacaacgagaacatgtaaaagagcaaaggtatatgctcaaaaagcaaaaagcgaaaaagaagcacagaggtaaataatccaaacaaaagcaggcgcagtgcctgcttttgtaattaaggactctactttgtaacatatatccaatgtttatactccgctgatttatgattcaatataaaccctaacttctccaaggttttttgtgagcctagattatcatgttcgcatcttgcggtgatccgggatactgtttctcggcttaatgcccagtttattagtttttgggcggcttccacacaataacctttgcggcgatgacttttatttgttgcaaaaccgatttcaatcatgccattttcgtctgggtcacctaaaaatccagttcccccaacaatttcataattgtccttctttacaataatccatgaatcaaatccttttgttccattgtttttgactaaaatctcgcggaaataaggtatcgcttcaaaaaaatcagaatttggccattcaccatttgtttcatagcctaattctttgatagcctgatgatcttgtttagacgcggcgtcaagaaggggaatatcaatcgtttgtaatcgtaatcgattcgtttcaaggagaaccatatatttaatcctcttttctttttactgggaataatgataacatataacaattttctctggtaccttggcagtagagaaagatgaaaaaattgagggggattgaaagagtgacaggtgagagtttgcccagaccaaaaacgggtaggaaaatgctgatgttaatgtgtccctacccgtttttctgttcctgaatgcagggtttctgataacatgttgtgctaccttttcgcaatcaaataaagcgatatggctctttgggtttgcacaggattatgaatgataatgacccattggtttcttcgtcttggaaagcttgctaccgcatacaatggagcagtatcgcgcggagtgaacccaccatttatcacgttgatatctcttccttcaagatgacaaactaagtattcacctggattgatgacctgttggttcgtccatgcgtaagaataaaagccgtctccaagatcttcggtggaagatggggggacaaagccatctacagtcaatgtgatttctcttcttcgctgtctttctgaaaagtctggacttctttgagggttatgagtatgtgaaaagtaaggaattaacgcagggccataaaagtaatgatacaaagcaaccactcctttattttccattcatacaaattgtatgtgggagttatttgttcattcctgttttgttccatgtagactaataatgggctataggcgtccaaggaaatcaatttgtccttccgttgattcaatgctagtaaccttgaaaatgcaggttaggatgatagaatttacatattactgcaagaagttagacatacatcattttgatagtgggtgaaaacaatggcgaaaaaaatggcaaaaacaaatgcggttcgtctgatagaacagcagaacatctcttatgaggtattagggtataaaacagacggccagccggtagatggcatctctgttgcggaaaaaatcggttattctttgaaatatgtatataaaacgttggttgcagcagcaggaacaaatcattattatgtctttgttgtacccgttgcagaagagttagatgtaaaaaaggcagcaaaggtgacaggggaaaagaaaatagaaatgattgcaatgaaggagctgttagcggtaactggctatcttcgcggcggctgctcgccaattggcatgaaaaaattgttcccgacctatattgatgcatctgcagaaacgcttgattttattattgtcagtgcagggaaaatcggtatgcagctaaagttggcgccacaagatttagccagatcatgtgatgccgcatttgcagaaattgtatagatgcagatataggggaacgaaaaagcttagtcatatcgattaagctttttccgcatccctttcaaatatgatttcaaaataagcagctgccccatacccatctatactgggagcgaaaatctgaacgaatctccagcctcttttcgcataatcatggatgatttgctggtagtcttctttaggccttcttctcatcgtactcagctcaactcttacgaattcatattctttcatcgtttgatccctcctattaaggtatacgtaaaatggagcgagaagttccgaaaacctaggttaaggtcggaaagtatatttcactcactaaacaaatccatttatgcctgatgcctgcatgcatctgggaagagttaaggggctataaaaacgaattttaccgggtcagcagtccaaatgaatctcttgcttattgcatttgactgagtatataagtaaaaaaagagcggccagaacatataagaaggagatgatcattaacgcactcataacagggtagtgtttagcggagtagatgaaaaaatcaagctgtgaaatttgtttggggctgctgacggcatcaattccattaagcagttttgagagtttagcagtatagttccaatcaaatcgatctgaaacaagctcgcttccttgataccaattaacagcagctaaaaacagaaataccataatagaaaatccaagctgaacaactaaaaatattcccttcacttttgtatgacctccaaatctatgaatatgggaaaatcaaacaatatattaccaccgtatgggttattcttgcaatttcacttccatacaactcaaacgcaagtctatttttttgtttgtttttggcttataatacctgatgatggaaaaagagtgcgggtttatagattagagaaacaaatgtatttcttagcattttttatttgtggagagagtatagaagcattcgattagatctgctttttcacagaaacggttttcatctgtttgcctgagctttacaattggctggcaaaaaaacaatgatttctttcaatcaaaacatgcaacgatgcgacacattttatatcttgatgacttatttcattgcctttaagtcatcctatcgagaaagcgatggtattttatgaacaaagaaaccctaaaaaacatactcatgattttttcaatatgcgcaacactccgagaaaccgatggtatgcgcatagctgatagctggattttgagtgagattatacgatttttgatttgcatggttgtgttttttgccatgacatttctattagatgctgtttttccaaacaaaaaagagtcacattaatgtgtggctctttttgcatcatctgatcagaaacatcataaatgaatcgatcatcatgatgaagaacagcaagcaaaaataaataagcgagtagacaaacatatcctttgcccacttcacgtcatcgtctgttttgaatcctttgatgctttttttgatccatatgcctccgagaaccaaggcggctaagaaataaaatgggcttatatggccggtgccgagagagaaaggaaataatagcgtgaccggcaccaggacggcaatatattgcatcatttttatttttgttacatgattgcctttgactactggcaagagcggaacgccagcagcgcgatattcctctttgcgtcttatcccaatcgcccaaaaatgcggcggctgccacagaaacataatcgtgtacaacagcactgctgtcatactgaagtcaccggttacggcacaataccccatcaatggcggcgcagctcctgggaagctcccgacaaatgtgctccacacagacgttcgtttcacccataccgtatagatgatcgcataaaaaataaaggcggccagtccgagaaaggccgttaatggattgagggaataaagcatggcaagacctgcgattcctaaaacagagccatatgttaagatcatggctggcggcattttccctgtgaccgaggccctgctgcgagttcgtgccatttttgcgtccatatgccgatcaaaatagttgttatagacagtgccggaagccatcacaaacgcggttcccaacattgctgttaccattgtcatcaaaaaagccaagccggttaacgttttttctgcgcttgcaaacgcgatccaaaacccgccgaaggctgctatcgagtttgatatgataatgcccggctttgcaagtttgataaaatcgtaaatggttacccggttcgaagcttttatgtattttgtttcagatatggctgcagaatctcttgtattctccaaaaatagacgcctcccccaaaactgcatgcttttgttatcgtaacaagagggggacagaatcacaattatttcccatatttgtcatgatattgtcatttttaaaacaaaaaaatggggagctggactgcccccattttgatatgtggcgactagtaaccgtaacctcccccatatcctccgccataacctccgccgtaaccgtaccaagggtagtaaggcggtcgcgggcgcgggtagtaataaggcgggcgcggataaaacgggtagaacggataatacggtcttggataataataaggcggataaaatggcggtctcggacgcggataataataaggctgtctttcatcataaggggtaatttgttcaaatgactgttcattcaaagggtaatccaagaggaaaacctccctagctttttttattccttttaccatattcctgatgcttaagttgggtgtatgtacattcatgaaattcggttttttttatgatgaaattccttaaaaaggattgacatgaacttctaaatctcatagtattacaaatgtgaaataaatgttactacaatgttacaaaaacatttctaaatagatacagttccaactgatgaagagtaaatcgaaatggctacgaaagaaggagtttttgttgttggcaaaaagaatcaaatggtttcatgtattaatagcagttgtatgtgtggtgggccttatcggctttttccataatcattcattgaaaaaagaaacggtcatgaataaagtaagaactgattctcaatatgggaatgttgagatcgcaacgcttgtgaatgacgggaaaacttttaattacgcggtaaactatcctgttttcaaaaatgaaaaaatggattcggcattaaaaagattcgcagaaaaagaggttcgtcaatttcaaaaggaaacaaaggacgttgaccaagagcatacgacaaaacgcaacgaattaaatgttgattataaaattgtccattatgccaaacagacagtggcgattgtatttaatgaatataaatacatcggcggggcacacgggcaaaccgtgaaaaaaacgtttaactatgattttagtaaacaagcgtttctttccattgatgatattttcaaagaggacgctgactacttacataagctttcgttaatcgcttatcacgagctgaaaaagaataaggacattgccgcggacgatgcactgttaaaggaagggacggctccgaaaaaagaaaatttcagccgctttgccatcaaggaggattatatcgaactttactttgacacatatcaggttgcagcaggctatcttggagagcaatcgattgccattaagaaaagtcttttgaaagacattctgaaagaacaatatattgataaagcaaaaaataaaaataaaatcaaagaacaaaagccgaagcatgaagtgatttctttacccaaagaggaaacagttgatccaaatcaaaaagtcattgcgcttactttcgacgacggcccgaatcctgcgacaacaaatcagattctagactccttgaagaaatataagggtcatgccacgttttttgttttggggagcagagttcaatattatccggaaacgctaataagaatgctgaaagaaggaaatgaggttgggaaccattcatggagccatccgcttctcacaaggctttcagtgaaagaagcgttaaagcagatcaatgatacgcaagacatcattgaaaaaataagcggatatcgtccgacgcttgtaagacccccatacggcggcattaatgatgaactgcggagtcaaatgaaaatggatgttgcgttatgggatgttgacccggaagattggaaagaccgtaacaaaaaaacaattgttgaccgtgtcatgaatcaggcgggagatggaagaaccattttgattcacgatatttaccgcacctctgctgatgcggccgatgaaattataaaaaagctcaccgatcaaggctatcaattggtgacagtttctcagcttgaagaggttaaaaaacaaagagaagcgaaataaattagaaaaggctgtccgtacggacagccttttttctatttaataagagcctgtggtggcccaaacatttaagtttggtcctgaatacttgccgaaagcgtaagaagtccttggatctaaatcatataccatcggtgtatagcaagacttttggccggccaccgcttttccattgccgcctgcagaatcacaattatatctttttccgtctgtgttccgggtaatctccgcatttgcttcatagccagacgtcaatgtattattcatcgtgatttttgcccaagccgttttacatgtactgctgaatttaagctcgactactccgatgacttgattgctggcattcactaagtttgaggatttttttgtagagccgctggacgcacaatcattgtaataagggctttttccatcgtaggcatgggtttccgccttggcgggtgcacctttgacggcaaaaacaaatactactgcgaataacaccaatgaagccttcataaacagtcttttcaatttatgacctccttaatatggcaaacaataaatcatatggaggaacaatcaaaacatgcatgcttttttgtgaacaataaaggcggccgggaggatggagttcttggccgcctctggtatgaggttatgcttttacatcaatggtttgtccgagagttggatgttgaatcatctttaaggtttgatcggcattttgctgggcggtgtccagcctttttttcgttaaagcaatatttacattctgggcaagggatgcttgatgcatcgcaaccgataaagcaggaatatccatggttccacctcctatgccttacctatcggcgggtttgtatgattttacagtgaaaaatggcttaatttctcttgttgacccttacgctgcggcatatcgtatgtttttgacaaggagggaatcaggatgaatctagtaatggaaaagacctttgagcaatacgaaaagctgttttcaatggaagaacagaaaagagaagatgtatttcggtatacgatgatgaggccgtttgaaaagatgtggaccgccatccaagttccgctgaaagcgaaggagccaaacggctatgatgtgatcatggctgcgaaaatgctgggctatttggatgtccgtgatgctgaaagcggccagaaagcactacaaatactgaaagaatcacatgtttcagagacagctgaatctgcacttcggcaatgcatattttttgctgagcgcgaacagctgcgggtgaatgcaaaggagatcaaattcggcctttatatcgctgatccaaataagcttcagctgcaaaaaggctactgcgggtttggcgggataccgggctttattcatgtatggattaatccgaacagttataacctgccaaggattccttccattattgctcatgagtttcatcataatgtgcggttttcgtatatagattttcatcatggctctgtaagtgtcggggattatcttgtgattgaaggattggcggaatcattcgccagagagctgtttggtacggaacgattgggcccttgggtaactcgttttgatcatgaagacttgcaatattccattgatgtgattaatgaggtgctggatgtgaaaggattttcggaagtcagccgttatatgtttggtgatccaattgctaacgaccaaggctttaagcctgcaggtttatcggcttttgcgggttatgcagttggctatcatgccgttcagtcatttatgaatcaacatcatatcacgataagcgaggccacacgtttggatgcgaagaccattatttctcaatgcggtctgttttctacatgaaaaaagcgtcacatacagcggcgctttttgattcccaaaaccagcagttctatggcggcacaggcggcaattccgattgtatatgcttcgatatcgctccataaaaaaccgtaccctagtacaagcccgccaagagaagtatctctaatctggtcgatccattcggcatgatagagctggctgaattcaatgacaaaacagaaagaaagactgataatgcccgttatcattgtcttcagcttccgaaatagaaatccgcatcccgtgaagatcatggcggcccacaacgagtctcccagataagtattgagggtatcaggaagaacactggagaatgctctggatccaagccccagcccaatgatcagtatggtgaaaactgcatatatccaacgatttcgcttcattgcgaattgataccccgtctctgcttcatctccctgtattgtaaggaatatagcttttatttgtccactaaaaaagcggctgaatagccgcgtagggtgtttattttgcttttaggtttacatggtcggctgtctgatccgtgcctattacaaaatggagttcatagcggcctgtatcatatacataatcgatttcatcggtaaacgggacggttaacacccgatttactggtcctaattgcttctgcagcacttccggcgtaactccgcctaaattcagctgccgttccacaccggttccaaagtagcggatttctgaaattgtcatgtctttatgataggaaaatccgtagcccggctgtcccatattccagtgatataaatcaaatcgattgtctcccccgactggtctttccggttccccaaacgcagcgtggacatccccttttgtgcttttgttaatggtaaggccttgcgcctgctgaggcatttcccctttataggcggtgttatagaggtttttgacaagctcagcggctgattgattcgtgttttctgagagtgtgtttgtttgagctgcggcctttgccggtgctgaaaaggacgcagccccaaagccggtaaaacagcttgttactgctgctgccgcggttatagcagacattgtctttttcatgttaatccctcctaattgatctaccattccgtttccccgtgtttttgcaacgaaacatgtgagtgcgctttgtatgttttattgagttgttgtaagggaactgaaataggtaattcggtatataaagcaagaaaggggaatggagatggctggcaagaaaacaatcacaataaacggcgttgaaatggaagcgtccgaggaacagacggtgctgcagcttttgaataacagctcgattgaagtgccgcaagtttgctatcatccaagcttagggccgattgagacatgtgatacgtgcatcgtcagcatcaatggtgagctgaagaggtcgtgctccgctgaattaaaggatggggatgtcattgatacgctctcacctgacgtgaaaaaagcgcaggtcatcgggatggacaagattttatataatcatgagctttattgtacagtttgcgattacaacaatgggggatgcgaaatacataatacggtgaaggaaatgaaaatcaatcaccaaagcattccgtttgatcacaagccataccataaggatgaatcccatccgttttatcggtatgatccagatcaatgtatattgtgcggacgctgtgttgaggcatgccaagacgttcaggtaactgaaacgctgaccattgactgggagcggaaacgcccgcgcgtcatttgggataacgacgtgccgatcaatgagtcgtcatgtgtgtcatgcggccattgttcaacggtctgtccgtgcaacgcgatgatggaaaaaggaatggaaggggaagccggatatttaacaggcatcaataacgaaacgctgcgaccgatgatcgagatcacgaaaggcgtagagacaggctacggctcgattctcgcgatttctgatatggaatcggccatgcgtgatgaacgaatcaaaaaaacgaaaaccgtctgcacgtattgcggcgtcggctgcagctttgatgtctggacaaagggcagagacattctgaaagtagagccgcaggaggaagcgcctgccaacggcatttctacttgtgtgaaaggcaagttcggctgggatttcgttaacagcgaagaacgcctgacaaagccgctgatccgtgaaggcgatcatttccgtgaagcagagtgggaggaggcgttattgctgatcgccagcaagttcactgaattaaaagaggcgtttggcccggattctctcgcttttattacatcttctaaatgtacaaatgaagaatcctatcttatgcaaaagctggccagaggggtcattggcacaaataatgtggacaactgctctcgctattgccaatctcctgcgactgccggcctgttccggacagtcggctatggcggtgattcaggatcaattacagatatcgcgcaagcggaccttgttttgattatcggttcgaacacgtctgagtcgcatccagtcttatccactcggattaaacgggctcataagctgagagggcagaaagtgatcgtcgcggatatcagaaagcacgaaatggcagagcgctcagatttatttgtccagccgcgtgccggatcggatatcgtctggctgaatgcgatcgccaaatatttaatagaaaacggcaaggccgatgaacgatttttgagagaaagagtgaacggacgggatgaatatgtaaaaagcctcgcgccgtacacacttgaatatgctgaggagaaaaccgggattgatcaagaaacccttatccaaatggcagagatgatcgggcaagctgacagtgtgtgcgcattgtgggcgatgggcgtgacacagcatattggaggaagcgacacgagcacggcgatctctaatctgctgcttgtgacaggaaactacggaaaaccgggagcaggttcttacccattgcgcggccataacaacgtgcagggagcaagtgactttgggagtatgcctgacagactaccgggctatgaaaaagtgacggacgaacaagtccgccaaaaatacgagcgtgtgtggggtgtgccgctgccgaaggagccgggtatgaccaaccacgaaatgattgaaaaaatccattccggacagttgaaagcgatgtatgtaaaaggtgaagaaatgggccttgtcgactccaatatcaatcatgtacacgctgcatatgaaaagcttgatttctttgtggtgcaggacattttcctttcacgtacagcggagtttgctgatgtggttcttcctgcgagcccgagccttgaaaaagaaggaacgtttacaaacacagaacgccggattcagcgtttgtatcaggtatttgaaccgctgggtgaatcaaagccggattggcagattattatggaggttgccaataagcttggcgccggctggctctatgagcatcctgcagacattatggaggaagcagccaagctgtcgccgatttatgccggtgtcacctatgaacgtcttgagggctataattccctgcaatggcctgtaaacgctgatggaaaggattcgcctttactctttacagagcgcttccctttcccagacggcaaggccattctctaccctgtccagtggacagagcctaaggaattcggtgaggaatatgatatccatgtcaacaatgggcggctcttggagcacttccacgaagggaacctgacttacaaatcaaaagggatttcggagaaaacaccggaagtgttcttagaaatttctcctgagcttgcggcagaacgagggattcaggacggaaccctcgtcagactcacatcgcctttcggaaatgtcaaagtgaagtgcctgattactgatcgagtcaaagggaaggaagtatatctgccaatgaacgattcaggggaagcggcgatcaacctgttaacaggcagccatgccgataaggataccgatacgcctgcttacaaagaaacatcggccaagatggaaattttgaagcacgacggaatcagcccgctgcctaagatcaaccaccgcaacggcaatccgcagccgcaaatcggtgtgcaggttcataagaaatgggcgcggaaggattatattttccctggtgacgctgtgaaaagggggatgggccataatggctaaagcgattaaacgaatccaaaaaatcgaggtaacagaagaggatcagcgaaagcgtgatttgcgggaaattgaagatgctctaattgaccacaaagaagcgattctcgaaacattgcatatgctgggccatatgaacgagcgcggggtcctgccgttgctccgcggcctttttggtcaaggggataaagttcttgatatcctggtgaaaaaggcagatacagaggaaacagccaatacgctgaaaaatctgcttcttctgtttggaacactcggcatgctggacgtgaagcagctggagcctctcattttgaaagtgaatgcgggtgtggcaagcgctgtagagcagaaaaacagtgaagaaaagacaggttattttgatattatccgctcgctaaaagacccggaaatcaacaaatcaattacactgctcttttcctttttaaaaggaatgggacaagatacaaaggagctggaacgcacgacgcagcctccggaacaccaaaaacatcatcaggaaccccgagagaaaagaggaatgaataagcgagattgacctcccacccgagcggcttcagccagctcgggttttttgatgaaaaggtctaatggactagtaaaaaatattcaaatactaggaagaagtaagattgtgatgaatgagatagaaataatcgttactttcttacctgttaagaaaagggaaaatctgattataatagaaatcgattactttagatgggggaacaatcatgaaaaaagtcttattactattatttgtcttgacgatcgggttagcgctttctgcgtgcagccaatcgagcgatgcgtcagagaaggaaaaaccgaaagagaaaaaatcgcaagaagagcttgaaaaggaacttgataaggaattgaaaaaaggcggtgagccgaagaccaaaaaagatgatcaaatacataaaataggagaaacatttaaagcaggacatacgaattttacagtgaataaagttgatagagtgcaaaaaggtgaatatatgaatgttggcggagctgtaaatgaggagacaaaaacaataaaagatgatgaggaacggcttattatagaagttacgatggaaaatataggggaagattcaataagctacaattttatcgggtttgatttaagagataagaatgatcaatcagtgcggcctgttttttctatagaagagaagggcagaatccttatgggaggaacactagtatcggggaaaaaggttacaggtgtactcagttatgtcatccctaaaggagaacagaaacattacacactggtatataatccgtttttagctgatacaaatagcagtaatacagaagagagagtaaaggacgatattgattacttggtgaagttagattagatgctaatttacagttgcacgtttttcatctgtggaaaacgtgcattttttatagcgaaacttgacttgaaaggatgagtgataaaagtgcaaaccaaatggctggaacgggcacagcggattcgggcgatcgcccaagcggggcttgctttttccaaggatgtgtacgacagggagaggtacgaagagctaatgaagcttagcgcggaaatgatggcggattactcggagaaggacattgaagttatcactgatttatggcaaggcgagaagggctatccaacaccgaaagcggatgttcgcggcgctgtattcagagagaatcagattttgcttgtccgggagaagcatgatgagctgtggtcgctgccgggcggattttgcgagattggtttatcgccggctgaaaacgttgtcaaggaaatcaaagaagagtcggggtacgatacagagccgtctcgattgctggccgtgctagacagccataaacactctcatccccctcagccttatcactattataaaatcttcatcgcatgcagcatgacggacgggcagggggaaacagggatcgagacgaatcatgccgctttttttccggaagacagactcccgccgctttctcctaaacgaaacacaccctcacagcttagcatgctgtttgactttttgcgccatccggacaagaaaacgatatttgactaaaaaagaaagagcctgtgggctctttcttttttataatgtaatgtgtttttcgttggcgagtttcagaagggtcaaaatagaatcggcttgtttatggccgagtttttgctttaatttgttttcttcaactaatcggctgccataaattttgacggaggctttgtcgacgacagtatgccagttttcctgtttttttccctcaacaagcggtttttcatgtctctcagaaaaagagaacacaaagagtacgaatgcaagtgaaagtaggattccgacaacttgttttttgtaatcagtctgtgctgccacgttgttctctccttcaccttttaccttctatttaatcatagaaccaaattattttacataatgggaaagtcatttttggagttagtgcatttggttgaaaacagagacgttttttgagcggagcggtgcaattgaatccatattggatttgcgtgcttatgcctaaggtcacgttgtgagccaaaacagcagtgcagaatagaaaaaaattgaaagattatggtaagatgaacgaaattcgagggggaatatatgatgcctgcatcgaacatcgtgatcgcctgcctgctgttatcaatttaattatttgtggtagtccctctctttttcgaaagcgggaggtgaagtggaacattaattgctgaattctttcaaggggagtgaccgtacatgaatgtgttaaaccgccggcaagccttgcagcgagcgctgctcaatgggaaaaacaaacaggatgcgtatcatccgtttccatggtatgaatcgatgagaaaggatgcgcctgtttcctttgatgaagaaaaccaagtgtggagcgtttttctttatgatgatgtcaaaaaagttgttggggataaagagttgttttccagttgcatgccgcagcagacaagctctattggaaattccatcattaacatggacccgccgaagcatacaaaaatccgttcagtcgtgaacaaagcctttactccgcgcgtgatgaagcaatgggaaccgagaattcaagaaatcacagatgaactgattcaaaaatttcaggggcgcagtgagtttgaccttgttcacgatttttcatacccgcttccggttattgtgatatctgagctgctgggagtgccttcagcgcatatggaacagtttaaagcatggtctgatcttctggtcagtacaccgaaggataaaagtgaagaagctgaaaaagcctttttggaagaacgagataagtgtgaggaagaactggccgcgttttttgccggcatcatagaagaaaagcgaaacaaaccggaacaggatattatttctattttagtggaagcggaagaaacaggcgagaagctgtccggtgaagagctgattccgttttgcacgctgctgctggtggccggaaatgaaaccactacaaacctgatttcaaatgcgatgtacagcatattagaaacgccaggcgtttacgaggaactgcgcagccatcctgaactgatgcctcaggcagtggaggaagccttgcgtttcagagcgccggccccggttttgaggcgcattgccaagcgggatacggagatcggggggcacctgattaaagaaggtgatatggttttggcgtttgtggcatcggcaaatcgtgatgaagcaaagtttgacagaccgcacatgtttgatatccgccgccatcccaatccgcatattgcgtttggccacggcatccatttttgccttggggccccgcttgcccgtcttgaagcaaatatcgcgttaacgtctttgatttctgcttttcctcatatggagtgcgtcagtatcactccgattgaaaacagtgtgatatacggattaaagagcttccgtgtgaaaatgtaatagataaggagactggagattcatgaaaaagtaccatatttcgatgatcaatatcccggcgtacggacatgtcaatcctacgcttgctttagtagagaagctttgtgagaaagggcaccgtgtcacgtacgcgacgactgaggagtttgcgcccgctgttcagcaagccggtggagaagcattgatctatcatacatccttgaatattgatcctaagcaaatcagggagatgatggaaaagaatgacgcgcccctcagccttttgaaagaatcactcagcattctgccgcagcttgaggagttatataaggatgatcagcctgatctgatcatctatgactttgttgcgctggctggtaaattgtttgctgaaaagcttaatgttccggtcattaagctctgttcgtcatatgcccaaaatgaatcctttcagttaggaaatgaagacatgctgaaaaaaataagagaagcagaggctgaatttaaagcctacttggagcaagagaagttgccggctgtttcatttgaacagttagctgtgccggaagcattaaatattgtctttatgccgaagtcttttcagattcagcatgagacgttcgatgaccgtttctgttttgtcggcccctctctcggagaacggaaggaaaaagaaagcctgttgattgacaaggatgatcgcccgcttatgctgatttctttgggtacggcgtttaacgcatggccggaattttacaagatgtgcatcaaggcatttcgggattcttcatggcaagtgatcatgtcggttgggaaaacgattgatccagaaagcttggaggatattcctgctaactttaccattcgccaaagtgtgccgcagcttgaggtgttagagaaagctgatttgttcatctctcatggcgggatgaacagtacgatggaagcgatgaacgcaggtgtgccgcttgtcgtcattccgcaaatgtatgagcaggagctcactgcaaatcgggttgatgaattaggccttggcgtttatttgccgaaagaggaagtgactgtttccagcctgcaggaagcggttcaggctgtatccagtgatcaagagctgctcagccgcgtcaagaatatgcaaaaggatgtaaaagaagctggcggagcggagcgtgcggcagctgagattgaagcgtttatgaaaaaatccgctgtcccgcagtaaaaacataaaaaccgaaatcaatttgatttcggttttctgtttaaatattttttttcatcccgcatctccggcattctctaagaaattttccgccttttacagagcttttgaacagtgtgtaatcacagttgtcgcagcgcccgctgcgggcatccggatattcattgaattcgtaaacaatcgatgtatcgtagccttttgtttcatattcttcttttttggtttccatgtcgatcctccgttacaagacgtgtctgctgtttatcttacagcaagcttccggcgtattcaatggattttaggaggttgggtttatcttgatttctcccttggtttgcgccaaaatagctttattaagcttatatacataaaaagcctatgcaaagaggagaggaaacgggtatgggaaaagggttacttggaaaacgcgtggcaatcggtggctcacgaaaaacggaagaaattagtacaatcattgaaaaacagggcggaatacctgtcatccggcctctccaaggtacagtttacttagcagagaagcaggtggagccggatttgcggacgtttgcggaagaaaaagctgactgggtcattttcacgacaggcatcgggttggagactcttgtcgatatggcagagaaaattggactgaaagatgagtttctgcaggccattcgccaagcgaaagcggcatgccggggatacaaaacgctgtctgcgctgaaaaagcttggaatcacaccggaagcttcggatgaagacgggacaacaagaggcttaatccgttccttggagcctcacgacttttcaggaaaaacagtcatggtgcagcttcatggcgaaaaagcgccggctctcatggcatttcttgaagaaaaaggcgcgtctgtcctgccgattctgccttatcagcacatcccgccggaggaggaaacggtggagcggttatgccgagagctgatgaacgatgaggtcgatgccgtttgttttacaacggccattcaggttcgttccctgtttgattttgccaaggggcgaggttatatcaatgaagtgaagaaggtattcgaagaacgcgccatcgcagctgctgtcggaaaagtgactgctgaagcactgcgggaagagggcattacgagactgcttgcgccagagattgagcggatgggtgcgatgattgttgagctggccaagtattatgaagaaaaggaataacaagtacaaaaagccgcttttccctcggaaagcggcttttgtctgtcattcattttgcttcagctgctgatgaacggtgaataatgatgggtatgtcagcacgcttaagattacacaagtcagcgcggctgaggccatcgttgtaaacacgattaagagttgaaagcgtactgcctgaatcgggtccgcgccggctagaatctggccagtcatcatgccgggaagctggacaagacccagtgttttctggctttcgagcgtcgggatcatactcattttcatcgctgaggtaagaatgcgctgtatggattgcttcggtgtgccgccaagtgacaatattaattgaatttcttctttgcgaacgccgacttctgagttaagccggtttagaaacaaacttgagagcaccatcgaatttccgatgaccatcccgctgatcggaatgacatatcgtgccgtaagcggaatgatatgaagagacagcagaattccctgcgtcacaatttctacgattgctaacgcggcaaacaccctccaaaacgaaccgatagtatttttctttcgcttgatgacattttgcgccgccaccgcgagcattaacagcaccatcagcaggataaaaacagggtggtctccgcgaaaaatcagcgacaaaacataaccgatgataagcagctgcaccgcggcccggatggtggcgatgatcatgtctttttctacaccggctttaaaggattttgataaaaacaaggcgatcaaaacaaagatcatcgttaaagagagagaaaggtaatccattaccgagtgcctcccttcaaaaattctttcgctgcttcatgctgcggagcggagaaaaatgtgtcggtttcagcgatttcaagcagccggccatctgccataaaccaaatggtatcggctattcgttttgcctgctccatattatgagtgacccacatgactgtccattttttctcttgatgctgacgtttgatcagttcttcaatctcaagagcagagaccgggtccaaggccgatgtgatttcgtccaacaatagaatggaggaaggatttgagagcgttctggccagtgacagtctttgccgctgcccgcccgataagtctctggcgcttctgtctaacaactctggcggcagccctgcaagcgaagccagcttttcaggagagtacagctgggattgatgcagcctttgtacaagacttaaattgtcacgcactgtcccgtcgagcacgggagccgattgaaacgcgagggctgccgttcgcctcagctcattgacattccattctctgacttcctttccgtatatgttgacttcgccgctgtcaggcgttctcattaaattacacatagaaaggagggtgcttttgcctgagccggaagggcctaaaacggctacgattgcaccctgttgaatgtctccggtgacatcctgcagcacatcataggtttgtccatcttgtttatagctttttctgactgatctgaaggagatggctggtatgttttgtgtttgatcgtttgcttccattacaataatcacctttcaatataagtaggctgacattatatttaactataacgtgaaacagattccttttggtagcacaaataaaggagaacaggctttcacccattctcctgcagatgctacgcagtcagatttgactgtgctttctttttcggttttctcggctgtgaagcgaaggtatgtaacatcatccccgctattataatgaacaaaccggcaaatgataatagagatgggaaaacgcctgacagcagaacaatttcaccaagcagcgcgaaaatcacttcaccggattgagtggcttcaacagctgcgagtttttgcggattgtctcttaccatatcagtggcccagaaaaataaaaccgtcgcaatgatgcctgagctgacggcaacgataaaggattgaacggtttgacttgctgttggaaggccatctgaccaccagccgtaagctgctaatataagccagaatggaaggcttgccaatgtcattccaagcacgcgctgaaatgtatcaagccggcctccgtattcttcgagcattcttcggtttcctaacggataggcaaaagccgcaatgacaaccggcagcacactgaaaagcagcatcctcccagaaagcgattctgcatgctgaagctgaatcagagccgctccaatcaggatgatcacagaagtgccaagtgaaaccaggggaatcttttggcgaatgagctgcggaccgcccggcatatcttgtttgacataaaacaaaggagataagagcaccccggctacaattgtaatttgccaggttccagctatgagccaccccggaccgtatgcagccgcaaatgtaatcggtgcgtaaaaaagcacgaaaccgacgaagctccatttgatccaataaaacggctttttcctcatttctagtaagagaggcgtgaatgtccctctcatgatgacaatcaaacataaaaatggcaccataaaaataaagcgcagcgaagagctccaaagccagctgcctcctgataactccatcgctctgtttaatataaaggtaacggcgaaaaagagtgaagccaatattccgataacgatagctttcatgatatccctcattctggcattatttttttatactatactattcggtatcatgcagatcaatggaatcatgagaaaaacatcatgtttggcgaaccgctatatgtggaagacaaaaaagggaggtgaaattgatggaaagagagacacagacatacttctttccggatgacggcaggattccgaatcaccctgattttccgctcgtggtgtatcaaaacgcgcttaaggacaccggactggcagagcggatcgtcacccggcatggctggtcaaacagctggtcagggagtgtttttccataccatcattatcacagcaatacgcatgaagtcctgattgcccttaggagagaggctgtgattcagtttgggggagaaaaaggggctgccatccctttcaaatcaggcgacgcagtcgtgattccagccggagtcggacataaaaagctcagctcaagccccgattttactgtccttggcgcctatcccggtggcgttcagtacgatatgaagacggggaagccgaatgagcgggaggaagcggtcaaacagattaagcaggcggcgttgccggcgaatgatccgatcacaggaaaaagagagcctctattggaaatatgggtaaagtgaaggggagaaattgctggattgtcaataactagtgccgcagaaacgatatgacatgagctccatataaattaatttcataatcgaagcaattcacgttcaaattttgttcaaaaagtgttatcatatagaaggtaatcgaattggagttttttgtgtttgctattttcagagagagtaaaggattttgacttattcaattgtttatttttagataaaaataatactgaatatggcaagatgaaaaactgggtagtaaacatttatttttgtaaatgattgtgcatgaattcacaatccttattcttatgccttaaaagcgtgagacagggagaggcactaccctttccaaaaaaatcagcaaactgcttatagtaaaggagaattggatatgccagaaacaatcgatcaaacaaatgcgtctgtcagccaaagccagcaagatcttattgatcagctattaaagccagaagttcaagaatcattgactgttttagttgaccagcttccgaagctgactgagttagtgaatattttaacgaagtcttatgatttcgctcagtctgtagcgactgacgaagtgttaaagagcgacacagtcggtgcgatcactgaaattctcgagcctgtaaaagaaacagcgaaagaagtagctgcgactgcgatcgaagcaaaagaccgcgcggaagcaagcaacgaaacaattggacttttcggccttcttcgcatgctgaaagatcctcaagctcaaaagctgttccgttttgctaacagctaccttgaagtcatgaacgaacgcgaaaaccaaaaataatctcagattcaaattgatataaaggacggaggatatacgatgtcaaaacatattgtcattctaggcgctggttatggcggagttctttctgctctaacagttcgcaaacattacacaaaagaacaagcacgcgtgacagtggtaaacaaatacccaactcaccaaatcattacggaattacaccgccttgctgcaggcaacgtgtctgaaaaagcggttgcaatgccattagaaaaacttttcaaaggcaaagacattgatcttaaaattgcggaagtaagctctttctctgttgataaaaaagaagttgcgcttgctgacggttctacattaacttacgatgcgcttgttgtaggtcttggttctgtaacggcttacttcggcatcccaggtcttgaagaaaacagcatggtattgaaatctgctgccgatgcgaacaaagtcttccaacatgttgaagatcgtgtgcgcgagtactctaaaacgaaaaacgaagcagatgcaacaatccttatcggcggaggcggcttaacaggtgttgagcttgttggtgagcttgctgacatcatgccgaaccttgcgaaaaaatacggcgtagaccataaagaaatcaaattgaaacttgttgaagcaggtccgaagatccttcctgttcttccggatgatcttatcgagcgtgcgactgcaagccttgaaaaacgcggcgttgagttcttaacaggtcttcctgttacaaatgtagaaggaaacgtaatcgatctgaaagacggatctaaagttgttgccaacacatttgtttggactggcggcgtacaaggtaacccattagtcggtgaatcaggcctagaagtgaaccgcggacgcgcgactgtaaatgacttcctgcaatctacatctcatgaagatgtattcgttgctggagacagcgcagtttacttcggtccagacggccgtccatacccgccaactgcacaaatcgcatggcaaatgggtgagctgatcggttacaacctattcgcttacctagaaggcaaaacgcttgaaacattcaagccagtaaactctggtacacttgcaagccttggacgcaaagacgcggttgccatcattggtgctaattctacaccgcttaaaggtcttcctgcttccttgatgaaagaagcaagtaatgtacgatatttgacacatattaaaggacttttcagcctggcttactaatccttttaatgaatctggcattgccaaaagcattcctttccgagtgctttctggcaatgtctttttttatgtttatgacagcgttaacatttcattttcaaaaaagagattgatcccaaaggaatataaaggtaaaataaaaacaaatcaaaatgttaacgttaacattttgaaatagaatgaaagacggtgaggacatggaacccttcatgggcaaaaactttttattgaaaaatgaaaccgctgtcagcctctatcacaattatgcgaaagacatgccaattattgattaccactgccacttaagtccgaaagaaatctatgaaaataagacatttcaaaacatcacggaagcctggctgtatggtgaccattataaatggcgcatcatgagagccaatggaattgaggagacatacattaccggagatgcgcctgatgaggagaaatttatggcttgggcgaaaaccgtgccgatggcgattggcaacccgctctacaactggactcacttagaattgcagcgtttttttggcatttacgagattttaaacgagaagtccgggtcggctatatggaaacagacaaataaactgctcaaaggggaaggcttcggggcaagggatttaatcgtgaaatcaaatgtaaaggtcgtgtgcaccacagatgaccctgttgattctcttgaataccatttattgttaaaagaagacaaagactttcctgtcagtgtgctgcctggatttcggccggataaaggacttgagatcaatcgtgaaggctttcctgagtgggtgcaggcgcttgaagatgccgctgccatatcgattacaacctatgatgagtttttaaaggcgttggaaaaacgagtgcgattcttccactcagccggcggcagagtttctgatcacgcgatagatacaatggtatttgccgaaacaacaaaagaagaagctggacggattttttctgacagattacaaggaacagaggtttcttgtgaagatgagaagaaatttaagacatatacgcttcagtttctttgcggtttgtatgcggagctcgattgggcgatgcagtttcatatcaacgctttaagaaacacgaatacaaaaatgatgaaaaggctcggacctgatacagggtatgattcaatgaacgatgaagaaattgctaagcctttatacaagctgctgaactcagttgagatgaagaaccagctgccgaaaacgattttatattcactgaatccaaatgataactatgtcatcgccagcatgatcaacagttttcaggacggtattaccccgggaaaaatacaattcggcacagcctggtggtttaacgatactaaagacggaatgctcgaccaaatgaaagcgttatcaaatgttggccttttcagccgttttatcggcatgctcaccgattccagaagctttctttcgtatacgcgccacgaatatttcaggcggatcgtctgcaatttgattggagaatgggtggaaaacggcgaagtgccgcgcgatatggagcttctgggaagcatcgttcaggggatttgctatgacaatgcgaaacactactttcaatttcaagaagagaaagcaaacgtgtaacaaagtgtccgctcagtatcgctgagcggatcactatccgaaaattcttaagacacagaggtggaacatgcgaactgaactggcaaataaggttgtgtcggtcgaaacggaaaaaaggctttcattgaaagagaaaatgtcctatggctttggtgattttggcaacggttttatgtttgatctcggccagatttatttattgaagtatttcactgatgtagcgggaatccccgctgcgatggccggcggcatttttttagtcagtaagctgtttgcagcgataacagatccaattgtcggctcatcaatcgattatcgcaaaaacatcggcaaacgggggaaattcaggccttatctattaatcggcagcatcgtgcttgcggtgcttactgttcttatttttctgtctcccaatgtatcaacgaccggaaaactgatatatgcatatgcatcctatatgatttggggcatcggctattcgtttgtgaatattccgtacggctcattaggggcagcgatgactcaaaattctgaggaccggacctccatttcgacgttccgccaaatcggatcacttggcgccttgtttatcacaagtgtggccgtgatgccgctgctcgtcaagtttgataatccgaaggtcggctacccggtggtcatgggcttgttcgccgcgctcggtgtgttttggttttatatttgctaccgcaactgcaaagagcgcattatcatatcggaagcacccaaagaaaaattaacactctcatctgtcgtcaaaacatttattacaaataaaccgctgttaacccttgtcctgatgacgattttttcaatttccgcatacaacattaaatccgccatgctcgtctatttcgcacaatataacttgggcaatgttgaattaatggcttatatgaacttcatcattattggttcttcctttttgggcgtcgtattccttccaaagctcgtcaagatgtttggaaagaaacgaacggcaatgatcggctttggcatcagtgtggccgcggatctgatcaactttatgcttccatctaacgtttatgtgtttacaattctcgccagtatcgcctttatcggaatcagtatcccaaatggcatcacgtgggctcttgtctccgatattatcgactatggcgaatggaaatccggtgaacggaaggaagcaacgacatattcacttttcaatttctcaagaaagcttgctcaatctttgtctggctttctctcggggatcggtttggggattatcggctatgtgccgaatgcagtccagacagcacaggcgctgattggcatcaaagcgctgcttcttctgtatccggccattgctttggcattagcgatgttcattatcggctttctttataaactcacagaccagcagcatgctcagatcgttcaggatcttcatcaaaagagctgacaatataatataaagaatatttaaaataatttgtaaataaaatgtgtttgtaggggtttcgcttggagagtgcccaaaaaactgaaaaggaaggaggcacttgcttgaaaacgataacaattgcagctgaagaagcaaaggaactcgtttggcaaaagctggacggtgccggtttgaatgaacgagatgctgaaaaagtggcagatgttctcgtgcacgctgatttgcgcaatgtacattcgcatggcgtgctgcacacagaacactatgtgaacaggcttttagcgggagggatcaatcctggggcacagcctgtttttaaagagacggggcctgtgaccggggtgcttgacggagacgatggtttcggtcatgtgaattgcgacatggcgatggaccatgcaattgacatggcgaagaaaaaaggagtcggcatggtcacggccgtaaacagcagccattgcggagcgctaagctattttgtgcaaaaagcggctgacgaaaagctgatcggaatggcaatgacgcatacagacagtatcgttgtcccatttggggggaggactcctattttagggacaaatccgattgcttacggagttccggctaagcataaaaaaccgtttatcctagatatggcgacatccaaagtggcttttgggaagattctgcaggcccgtgaagagggcaaagaaattcctgaaggatggggagtcgatgaaaacggagaagcagtaactgatcctgacaaggtcgtctcactttcaacattcgggggcccgaaaggctatggactatcgattgtagtggatgtgttttccggattgctggcgggcgcggcttttggccctcatattgccaaaatgtacaacggccttgatcaaaaaagaaagctggggcattacgtttgcgcgatcaatccatccttttttactgactgggatacgtttttagagcagatggatgccatgattgatgaactgcagcaatcaccgccggctgttggattcgaaagagtgtatgtgcccggcgagatcgagcagctgcatgaagaaagaaataagaaaaacggaatttctatcgcccggagcgtgtatgaattcttaaaaagcaggtgagtaaaatgaaagcggttcaagtgcgaaaagcgtatgatctggtgacagcggaggtgaagaagccagttctttcaaaggatgatgaagtgctcgtgaaagtcaagcgagtcggcatttgcggttcagacatgcacatttatcatggaacgaatccgctcgctaccctcccgagagtcatcggacacgaggtaacgggacaagtggaggcagttggtgcgaatgtacagagcctaaaacccggtgatcatgtggtgattgagccgatttcttattgcggatcgtgctatgcctgccgcaaagggcggccgaatgtttgcgccaagctttctgtatttggcgtacatgaggacggaggcatgcgggaatatattgtgcttccggaaagacagcttcacgcggtctcaaaggacttgccttgggaggaagcagtcatggccgagccttatacgataggcgcccaggcagtgtggagaggccaggtggaaaaaggtgataccgtcctgatccagggagcggggcccatcgggatctgtgtgttaaaaatggcaaaactggcgggcgctgctgtcatgatgactgacttgaacaacgagcggctggcatttgcgaaagaaaacggcgccgatgctgttgtaaatgtccaagcagaacatgttgccgagcgggtccttgaatggactgggaatgaaggagcaaacgtggtcattgatgctgtttgcctgccggagacttttgcactttcaattgaggctgtgtcaccggcgggacatgtggttgtgcttggatttgatgaaagagcggctcagatttctcagctgccaattacaaaaaaagaagtcacgataaccggatcccgattgcagaccaatcagtttccaaaagtggtagagcttttgaatggaggccggttaatgcataacgggctggtgacccatacattttcagttgatgacgttcatcatgcatttcagtttattaaggagcatccagatcaggtgcggaaagccgtcatcacgtttgattaaatgactgaatccggaggtgcgagcatgaatatgacattccgatggtatggacgaggcaacgatacagtcacacttgaatacgtgaagcaaattcccggtgtcaaaggcatcgtttgggctctccatcaaaagcccgtcggcgacgtgtgggaaaaagaagaaatcagagccgaaactgaatatattcaatcctatggttttcatgctgaagttgtagaaagcgtgaatgttcacgaagcgattaaacttgggaacgaagaacgcggccggtatattgaaaactacaagcaaacgatccgcaaccttgccggatttggcgtgaaagtgatctgctataattttatgccggtttttgattggacacgcacggacatgttccggccgctagaagatggatcgaccgctctgttttttgaaaaggccaaggtggaaagccttgatcctcaagagctgattcggacggtggaggaagcatccgacatgacactgccggggtgggagcccgaaaaattggctcggatcaaagagctttttgctgcctacagaacggtcgatgaagaaaagctatgggacaatttatcattctttttgcaggaaattcttcctgttgctgaggcctatggtgttcaaatggccattcatccggatgacccgccgtggccgattttcggactgccgcgcattatcacaggagaggcaagctataagaaactgcgggcgatatcagattcaccgtctaattgtatcaccctttgtacaggttcaatgggagccaatcccgctaacgacatggtggagatcgctaaaacgtatgccggcatcgctccattttcacatattcgcaatgtgaaaatttatgagaatggcgattttattgaaacatctcatttaacaaaggatggttcgatcaacattcaaggcgtgatggaagaactgcataagcaggattacgaaggatatgtcagaccggatcatgggcgccatctttggggcgagcaatgccgcccgggatatggcttatacgatcgggcacttggcatcatgtatttgaacgggctgtgggacgcttatgaagcaatggcaaaaaaagaggtgggcatatgatcccgctgcatgagaacctggctggtaaaacggctgtcatcactggcggcagcggcgtgctttgctctgcgatggcccgggagctagcccgtcatggcatgaaggtggcgattttgaatcggacggctgaaaaaggccaagcggtcgtgaaggagataacggcggctggcggcacagcgtgcgctgttgctgcggatgtgctggacaggatgtcactggagcgggcaaaggaagacatccttggccaatttggcgctgttgatctgttaattaacggggctggcggcaatcatcctgacgcgataaccgatgtggagacatatgaagaagcgggagaaggccaatccttttttgatatggatgagaggggctttctaactgtattctccaccaacttcaccggtgcgtttctggcctcgcaagtgtttggtaaagaactgctgaaggcggattcacccgcgatcatcaacctttcttccatgagtgcttattcacctatgacgaaggttccggcatacagtgctgcgaaagcatccatcaataattttacgatgtggatggctgttcattttgccgaaaccgggctgcgggtcaatgcgattgccccaggcttctttctgacaaaacaaaatcatgatctgctgatcaaccaagacggaacgttcaccagccgatctcacaaaattattgcgggaacaccgatgaagcgcttcggaaaaccggaggatttgctcggtacgctcctttggctggcggatgaatcctattccggttttgtcactgggatcaccgttcctgtcgatggaggatttatggcttattcaggtgtgtaacgaaagcggtgcaacagaaactgaaccaacataggggtgaggttgagatgttttcaaaagataagcttcccgttatcctttttttgttcctggcaggggtgattaattacctggatcgctcggcgctttccattgcagctccttttattcaggatgatctcacattgtctgccacacaaatgggcttgattttcagcagtttttcgataggttatgccatttttaattttcttgggggcgtggcatccgaccgctatggggcaaagctgaccttgtttgtcgcgatggttgtttggtcgctgtttagcggagcagtcgccctcgcttttggctttgtcagcctgctgattatacgcattctcttcggaatgggagaaggcccgctttcggcgaccatcaacaagatggtgaacaactggttcccgccgacccagcgggcgtccgttatcggtgtaaccaacagcggcacgcccctcgggggagccatttccggcccgatagtcggcatgatcgcagtggcgttcagctggaaggtatccttcgttctcattatgattattggattgatatgggcagtgctctggttcaagtttgtcaaagaaaagccgcaagagacgatcaaggaagcaccggcaataaaagcagaaacgtctcccggagaaaaaattccgctcaccttttacctgaagcaaaaaacagtcctgttcacggcgttcgcttttttcgcttacaactacatcctcttcttctttttgacatggtttccgagctatcttgtcgacgagcggggattaagtgttgaatcgatgagtgtcatcacggtcataccgtggattttaggatttatcgggctggctgcggggggatttgtttctgactatgtgtacaaaaaaacggcccgaaaaggtgtgctgttctcgcgcaaggttgtgcttgtcacgtgtttgttttcatcagctgtcctgattggttttgccgggcttgtggcaacgactgcgggggctgtcactcttgtcgctctgtcagtgttctttctttatttgaccggtgctatctattgggctgtcattcaagatgtggttgatcaaaacaatgtcggttctgttggcggcttcatgcatttcctcgccaacacggcaggaattatcggcccggctttaaccggatttattgttgaccaaacaggcacgttttctggagcatttttgcttgccggtgggctggctgtcttcgcttcacttgctgtgattcgttttgtccgtccaatcattggtaagccagcgggaacagaagctgagaatcctgtgtcttattaatctggaaatatagtgggagaggcggtatgtttgatgatacaatatacagtaaataatcgcagccggtatgataaggaagggaattagatggtaaccataaaagatatcgcaaaactcgcaaacgtatcccacactactgtttccagagcactcaacaacagcccttacatcaaagaacatacgaagaaaaaaatattagagctagcagagcagctcaactatacaccaaatgtaaatgcgaaaagtctggcgatgcaaaagtcgcatacgatcgggctattctttacaagcattacaaacggaacctcacacagcttctttgcagacactatcaaaggcgtcaatcaagccataagtgaggattacaatctgtatgtgcgcggcattgatgatctgaaaaactatgactccgttacaccgatgagatatgacggcatcattttaatgagccaaagtgacattgataattcttttatttaccatattcgcgaaaaaaacattccgcttgtcgtgctgaatcgtgatattgatgatcgtaccatcacgaatattttgtccaatgacaaggaaggctctcaagaagctgtagaatacttcattcagtccggacatcaagacatcgccatcatcgaggggatcgaaggctttaaatcctcccagcagcgaaaggaagggtacttatccgcactgattcaacatcatattccgatcaagcatgaatacagtgtcaaaggacagtacgatatggaaagcggctttcaagcgatggagcggctgctggcactgccgaatcctccaaccgctgttttttgttcgaatgatgacatggcaatcggagcgatgaatgcgatattcgcaaagggcctgcgcgttcctgatgatatttcggtgatcgggtttgatgatattgggttttcacagtacatcacgccaaggctttcaacagtaaagcgcccagtggagaaaataagcgtgctcggtgcgcaaaaactcttgtcgctgatcagcgagcccgaaacaaaagcagaaaaaatcttggaaaacacagaatttatggtgcgtgattcagtcagacgattgacgacgtgatgtcccgtttttcagcgggcattctttatacagaaaaatgttaacgtgtgcataaagtgagagggaggcaataagggtgcagaagctgaataaaaatgtgtacgatcactatactcagtatccagaaaaaattctccaattcggagaaggaaactttcttcgggatttatcgattggcagattgatcaattgaatcaacacactgattttaatgggagcgtggcagttgtccagccaagaggctcagaaaaaatcaaacgattaaatgagcaagatggattatatacactttttttacaaggaatgaaagacggagaagcggtaaacgagcatatgattatcaactcaatcagccggggaattgacctgttttctgattatgaagcatacaaagaattggcatcaagcgaaaggcttcggtttattatctccaacaccactgaggctgggattgtatgtgatgaaaaagatcgtttagaggataggccgcaaaaaacattccctgggaaattaactgcatttctttactttcgctatcaggcttttaaaggagatcagacaaaagggtgtgtcctgatcccatgtgaactgatcgagaataacggtgaaaagctgagggaaacggttcttcattatgcacatctgtggaagctggaggaaggatttacacagtggattcatgaggccaatacattttgtaatagtttagtagaccggattgttccgggttttcccgtcgacagcattgatgagatcacggcagatcttggctatcaggatgatttgatagttgtgggagagcaatattatttgtgggttatcgaggggcctgattggattggaaaagaacttccctttgcggctgcagggctgcatacaaagatcgtcagcgacctcaccccataccggactaaaaaagtaagaattttaaatggcgctcatacagcaatgacgccagtggctttattatacggcttgaagactgttagggatgcagtcgagcatccggaagtggggcgatttataagagagctgattgatgacgaaattcttcctgttttaaaaatggaaggtctttctcagtatgctgacgatgtgctgaaccgttttaaaaacccgtatattaagcattacctggaaagcattgcattgaacgccatttccaaattcaaaacgagaaacctgccgactcttaaggaatatgctgaacaaaagggacagcttcctgaacgcttggtgttttctttcagcgctcttctgtatttttatcatgataacgagacattgcaggatgatccggcagttcttcaatttttcaaagaggtttggtgtcaggaggatggcgacatgcttcggattgcatcaagagtgttaggcgaacagcggctgtgggggcagatctcaatgagataccgaagctgactgatagagtcgctgtttacttgaatcatattcatgagctgggcatgcagagggctcttgaacaatactgcatacaagggggagaggtacgttgaagtcgtttataaagattcataagcaagataatgtccttcttgctctgcgggatattcaaaagggagagaggctgcatgcttacggcgtgtcgattgaagtaaaggatgatataaaaagaggccataagattgcattgcagtctatcaaagaaaacgacagcatcgtcaagtacgggtttccaatcggtcatgcatcacaagatatctcgatcggagagcatattcatgtccataatacgaaaacaaacctgtctgatatccaattatacagctatacaccgagatttgatgaaaatccgtattctaatgagaaccggacgtttaaaggttttagaagagaaaacggagatgcgggtgtacggaatgaattgtggattgtcccaactgtcggctgtgtcaatggaatagcagaaaaaatgctgcagcgttttgtcagagaaacaggggatatcgctccatttgataacgtactggtgttaaagcatcaatacggatgctcgcagcttggcgacgatcatgaaaatacgaagcagatcctgctgaatgccattcgccatccaaatgccggcggcgtcttggtgttagggcttggctgtgaaaacaatgagctggcaagaatgaaggaagcactgcaagatgtgaacttgaagcgggtgaagtttctggaatcccagtcggtgaccgacgaaatggaggcaggcgttgctttgctgaaggaaattcatgaagcggccaaaggagataagagagaagacattccgctgtctgaactgaagatcgggctgaaatgcggaggttcggacggtttttccggcataaccgcaaacccgctgcttggacgtttttcagattatctcattgcacagggagggagtactgtgctgacggaagtaccggaaatgttcggcgcagaaaccatcctgatgcagcgggctgccaatgaagaagtgtttcataagatagtcgatttaatcaatgatttcaaacaatactttattaaacatgatcagccggtgtacgaaaatccttcaccgggcaacaaagcgggcggcatttctacacttgaggataaatcgctgggctgtacgcaaaaagcggggatttctcctgtcacggatgtcttgaaatacggtgaagtactcaagacaaaagggctgactcttttgagcgcaccgggcaatgatttgatcgcctcctccgcattggcggctgccggctgccaaattgtcctctttacaacgggaagaggcacgccgtttggcacctttgtcccgacggtgaaagtagcgacaaacaccgagctgtatgaggcgaagccgcattggattgattttaacgcaggccttttagcagaggatgatgttcatgaggaatatgtgctgcgtgagtttatccactatatgattgaggtggcaagcggccagcttgtgaaccatgaaaaaaatgatttcaaagaactcgccatttttaaatcgggtgtgacgttataataagaaaaggctatccttcaagcggatagccttcttcattaaatcaattttaaaccgctgactaaaataatggaagccataataaattgcagtggacgcggggagaatcgaggcgaaagatggctcccgatcagtacgccgggaattgaaccgaggagcagattagctgccagcatgtaatccacgcttccgaagcttgcgttcaaaatgcctgctgccgtaacaagaagaaaagcatgcgcgatatcggttccgacaatctgtgacgctttcatgttaaataagtaaatcatggcgattgcaaataatgagccggacccgattgatgttaatccgacgataaacccaaacacaacaccaataagaattgtcagcgccctcttattttcaagcggcatcagctgccagcggttggggcgaagttttctatccaaaaacaaacgaacgatgattgaaatggcaaccagcgttaacacatatcctagagcgtgcttaataatttcttcctgatgctggtgaaaggcggggaacaaatgcaatatgccaatggctagcgaagcactcggaatactgccgatggctaagtattttaccaatttaaagttaatcgttttctgccgccaatgggaggcaacgccaaacagctttgtgatcgagttatatacaagatccgtaccgaccgcgatggaaggattaattccaagcacaattaaaaggggagttaataaggccgctccacccactcccgtcaatccgactaaggctccgacaaacaaacccatcaatatgatgcttacactcatgataaaggcctcctgaaaacccgactatttttatcagattatatatgattaggacgcgttaatcaattaaattttttgaatttttgcacgttagttgcttgaaattttggtatgctcaatatctctattcatttgccctataatgagtgtctggacgaaatcgagaagtactaaaggcgcaaaaaaaagatacctcttaacaggtatcttttttcttgtttacgctacatgcgctgctgatagaaaggaagctcagtgtggcccatttcccgcacatacacgaacaggttgcctttatggtgaatttcatgctccattgcaagctgaagcagcgcgcggcctgtgacttttctgccgaaagcggatgtcagatcaatttctctgtccagctgctcttcagtcagctgttcaaggatagcgaccgttttttctgtatatgtttttgccagaacattgagatctgtttctgtttcttcctgcttgttttgaaatggtgaggcattgccttccttaatgacatttgcgaacaagtggaaagacgtaagaatgtgtttgaccagctcttctgctgacattgatgtttctgccggtttgtagctgtaatggtctttgctgattttttcggcaagctcattggtcacgtttcgatgggataaaaaatggctgacaatttgattggattggcacattatgatctcctccatatgtaaaaataaatggtgcaatgaaatcctatatcaacggttatgaattcacaagtaatatgctgtgggatgaaacaaaatgctatgtcaatcgtatatataacgttcacaaaacatgaaatggagtataaacatgactaacatacctttcatttatcagtacgaagaaaaagagaatgaaagagctgcggcgggctacggcactttcggttaccttatcacacggattgaagaaacgctttatgatcaatacggtgtattctatgagctctatgccagtgatgatccaaatacggaatactgggagcttcttgtagaagatgtccgcagcggttcattggagcctgagcatgtggcatatatatttgaaaagcttgaaaagaaaacctttgcttacgatgaagatgagaaagaaccggattataccgtccataagtctataagaaacagtgtatacgcgtatcctgaaaagggagttgcttttgccagaattccatattttcaagatgggagcattatgagttttgattgtctgtttgcggttaacgatgaaaagatgcgtgcatttctggagggagtcagaccgcgtctttgggaaaaaagcaagcggaaagtgaccgtgtttacggatggagatggagggacttcaagagagcaggaagccattgtcagagaggttcagcggagtcaagtcatcatgaatccgctattgaaaaaagagatatacagatcaattgatcagttttttcatagtgataaatcgttttatcaaacatatgacatcccttacaagcgcggcattctgttatatggacctcctggaaacggaaagacgacgttagtgaagtcgatcgcaggcagtatcgatgcacctgttgcttattggcaaattactgaatttacgtcgagcgagacaatagaagaagtctttcaggcagcgagacgcctcgctcctgcagttctggtcatcgaggatatagattcgatgccggaagatgtgcggtccttttttctcaatacgctggacggcgcgacatcaaaagaggggctatttctcatcggtacgacaaactatcccgaagagatcgatccaggtttgatgaatcgtgcaggacgatttgaccgtgcctatgaaatcgggcttccggatgaagagctgcggctggaatatatgaaaatgagaggctttggcatctttttgagtgaaggagaaataaaaaacgccgcaaaacttacagaaggcttttcctttgcacagctgggagaattatatgtatcttcagcccttcaatggcaccaagaagggaatcaccatattgaaaccatggtgaaagacatgacaggagagcaaagaaaaagccagcggggaagctggatggaaagaaacaaagtcggttttcactaaaagaaagcacgggtgtttgaaaaacccgtgcttttttgttgcggttagccgaaattcgacaattgcggttattttgcgttcttctttttcttgtaaatatgataaaatatgacatatctcgggtaattcaaaaggggggattaattgaggatgaagcagacgattccgtcctcttatgtcgggcttaaaattaatgaatggtatactcatatccggcagttccacgtcgctgaagccgaacgggtcaagctcgaagtagaaagagaaattgaggatatggaagaagaccaagatttgctgctgtattattctttaatggagttcaggcaccgtgtcatgctggattacattaagccttttggagaggacacgtcgcagctagagttttcagaattgttagaagacatcgaagggaatcagtacaagctgacagggcttctcgaatattactttaatttttttcgaggaatgtatgaatttaagcagaagatgtttgtcagtgccatgatgtattataaacgggcagaaaagaatcttgccctcgtctcggatgatattgagaaagcagagtttgcttttaaaatggctgagattttttacaatttaaaacaaacctatgtttcgatgagctacgccgttcaggcattagaaacataccaaatgtatgaaacgtacaccgtccgcagaatccaatgtgaattcgttattgcaggtaattatgatgatatgcagtatccagaaagagcattgccccacttagaactggctttagatcttgcaaagaaagaaggcaatccccgcctgatcagttctgccctatataatctcggaaactgctatgagaaaatgggtgaactgcaaaaggcagccgaatactttgggaaatctgtttctatttgcaagtcggaaaagttcgataatcttccgcattctatctactctttaacacaagttctgtataaacaaaaaaatgacgccgaagcgcaaaaaaagtatcgtgaaggattggaaatcgcccgtcaatacagtgatgaattatttgtggagctttttcaatttttacatgcgttatacggaaaaaacattgacacagaatcagtctcacacacctttcaatttcttgaagaacatatgctgtatccttatattgaagagctggcgcatgatgctgcccaattctatatagaaaacggacagcccgaaaaagcactttcattttatgagaaaatggtgcacgcacaaaaacaaatccagagaggagattgtttatatgaaatctaaatggatgtcaggtttgttgctcgttgcggtcgggttcagctttactcaggtgatggttcatgcaggtgaaacagcaaacacagaagggaaaacatttcatattgcggcacgcaatcaaacatgatgcataaaaaaagacccttaggggtcttttttatttcttcagcttccattcttttatcgtcagctcagaagatccacttgccaccagcggatccgcatggccgatttccgctgcctcttccagtgaatctgcttcgatgacatacgctccgcctgtggcgtcgctgaatggcccaaacatttttaaacgtttttctgcctgtaaacgatccagaaattcatagtgcccagccacatgctcctgattaaatttctccgttctcattgtcagcattaaatatgtatacatattcagaccctccgtgaacttcagtttaacacatttatccatattacggtgatagatgatatgagcttttcgtcctacgaatgccacctatttatgaaaaaagaaaaggagagatgataggtgagcattccagtaaagaaaaatttggtttctgaggcgaaatacgcgttgaagtgtcctaatgcaatgtccgctgaatacattaccattcacaacacggcaaacgatgcatcagcggccaatgaaatcagctatatgatcgggaacacaagctcgacaagctttcattttgcggtcgatgatcaagaggtgattcaaggtctgccgcttaaccgaaacgcttggcacactggtgacggcacaaacggtccgggaaaccgcaaatcaatcggtgttgagatttgctacagcaaatcgggaggcccgaagtatgaggcagctgaagccttggcgatttcatttgttgcacagctgttgaaggagcgcggctggggcatcgatcgggtgagaaagcatcaggactggagcggaaagtattgcccgcaccgcattttatcagaggggcgctgggatcaagtgaaggcggcgattgaaaaggaattaaacgggggcgtatcagcgaaaaaagctgcagtctcttcttcggcgtctgaatatcatgtaaaaaaaggtgacacactgtcagggattgccgcatcacacggggccagtgtgaaaacgctgcaaagcataaatcatatcactgacccgaaccacatcaaaatcggacaggtgatcaaactgcctcagacggcatctgcttctaaaagccatgccgcatcctcatatccgctcccatccggcgtgatcaaagtgacaagcccgctgacgcaagggacaaaagtaaagcaggtgcagactgctttagccgctctttatttttatcctgataaaggagcgaaaaatcacggcgttgacggcgtttatggcccgaaaacagctaatgcagtgaaacgttttcagtctgtcagcggtttaacggctgatgggatttacggtccgaaaacgaaagcgaagatggaggaaaagctgtaaatgaaaagacggaagctgtgaagcttccgtcttttcgccttacatacaaactgcggcaagcaccttttgaatatcataaatgctttcatcttttttaaactgctttgagacagcgggaagttccgcgccggagatccaaattttcagctctgaatcaaggtcaaagcggccggcagtttccacgctgaatctggaaatgcttttgtacggaatcgattgaaattccgttttcttgcctgtaattccctgtttatctacaaggataagccgcttgtcagtaaagacaatcaaatcgcgaaccagcttaaacgcggcttcaaccttctcaccctcaagtaaaatatgggcaagctcttcttgcacagctgccgttgacagtgttgatgcattgccgagtaatccatcaataaaccccatcatatacctcctctgcgtattctatcaaatcatactataaaaaaggttttcattcatagatgagtagagtaaactggtgctgactggtaaaggggggcgttcaagatggaagatatgtatgacagctttgcggccctttctgcttctgagtcggagtaccggattatttatgaggagaaaaacggaagtgagcttatcgtcctcggtcctcacggcggcagaattgagcctggcgtcagtgaactggtgcgggcattttcggatcgatgttccatctatttgtttgagggtctaaagcagcgaaacaaccgttccttgcatctcactagcattcgttttgatgagccgctggctttagaaaaagtgaatgaccaccattacgcattagcgtttcacgggtattatgatccgaaaatcccgcatacattggtcggcggggcggatcgtaaaaaagccaagctcatttgtgagcgtctgaatgaagcgggttttagcgccgagctcactaatgagaaagaccgcctggcaggtgtacacccaaacaatattgtcaatcggacgaaaagagaaatgggactgcaattggaggtaagcacggcacagcgaaatgcgctattccgcaattttgggtgccgtgataaaagctacatacaaaacgatttgtttgatcgatatgtggaagccgtcaagcttggcttttatacataaaactagacgggacctgcacggttggcctattccttcatacgctggggttgtgcgaaagtgtggggaggaatgattcatgttttatcatataaaagagcttcaatatcaagcaaagccagctcatcccgatccggtttatgcgaaaaaacttcaagaggtgctcggcggccaattcggtgaaattagcgtcatgatgcagtatttgtttcaagggtttaactgcagggcggatgctaagtataaagatttgttatatgatgtggggaccgaagagattgggcacgtagaaatgctggcaacgatgatttccaggcttctggacaatgcacccgcggatgtacaggaggatgcttataaaagcaatcccgctattgcagcagtcatgtcagggatgaaccctcagcacgcgattgtgtccggattgggggcgatggcatcagatagtgagggctatccgtggaatgcaaaatacattatctcaagcggaaacctgctggccgattttcgcgctaacttaaatgcggaggcccaaggacgccttcaggtgacacggctttatgccatgaccgatgatccaggggtaagagatatgctgtcatttttgattgcaagggatacctatcatcaaaatatgtggtacgcggccattaaagagctggaggaaagagaacgggatattgtcgtcccgacgacgtttccgcgtgagctcgaaaagcaggaagtctcctatgacctgtttaacttttccaggggagatgaaagctcacaaggaagatgggcacatggggaagcctttgacggccggggtgaattcaggtatatcccggctccgattgcgttcgcatctgcgcctcatcttaaaccggcgcccatgtggctgcataatacagttcccccaatgtcgaaatgttaggttctcttctgggctgaggaatatatcctcagcccgtatttgatcagatgtttttaccaatatgatataacgctttttcctcagcgacctgcaagtgctgctgatcgccttcctcgtacgcatttggccgcttgtgagataataaataagcgagccgcttctgaaattgaatacctgctttacgccgttcaaacatgtcaagccttttatcagcaaattcctttgttacccggaataccgccgcaattgtggcgagtgcctggcttctccattgcggcagttccatctgcaacagcataaaggttggcacacagaagtggtacataaattgatttgcctggaattcctgaagctctctgaagagcttgttcatctgaaaatgattgcctgcatgctttaacacgtggcacagctcatggccaaaatcctcccattgctcttcccgtgactttttttggttcaatacgatactgtacatgccgtcgtatttcaccatcatgctccccatatcctcaaaatgcacccaaatatccagatcctttgcgattttcagcatgtcaatgtgatgaggggatgtgatgcccagccggccgtataaatttttaacgtattcctccagatgtgataagtaatcgcccaattgaatactccctttcgaacgtttgttctgtttttagcgagaaagaaaagcccgtataggactggaaggtagtgtagaaatctttcccttttctttaaaaaataaacacttttttctttatatcggtctactttttatatgttttagagaacagagaacgatttatttatttttcggtttgcggtttttctctttttcttttaaatagttgataaattcgatggcctgctgtttgctttctggggaaaaatcctgcatatcgcggtatgcaagctgcaggtccggatctgagaacatatcgtcatcggattttttgtctttccccgttaataagtaatcagtcgttacttgaaagtaatcagccagcttttggagtgtgtcgtaatcgggttcgcttcgcccgttttcatagtgggaatatcgtgcccgtgacacaccgatgtgtgatgcgatttcttcctgtgtccttttccctctgagactcttcaatctgccgcctatcatactatgacctctcttttttaaactccctacgttacttatgattatagatacaaaatgtatcaaaataaagttatgataaaaaaagtatcaaaaataacttgatgatacagaatgtatcgtttatacttggtaacatccgatacaaaatgtatcaaaaaagatcaggagagtgatcacatgtatccgatccaaatcgtttttagtgaaaatcccatagatcagcgccatctcggacaatccggcggcaccatttcgtttaccgcatgcggccttccggtgtttcactttgaaacgcaggaacagtttcaagcatacatgatgttaaaaggagaagcggcgtacaatgaaaaacgataaaagctatccttttccgacgtattcagggttgttgaattcagaacattatgacaaaattggcccggcgttatggctgtttctctggtttatcagctcaacaacaaaagaaatcgaaaaagacggcgtaagctggggcatcgtactcggccataagccgttaaaagcgagagaaatggcggcagtcttcggcgtaagtgaaaaaaccgtcagaagatggctggagcttctcgaaaaccatgattacataaaggccgtccgtgcgccatacggactgatgatttcggtcaagcattcaaaaaaattcagcttcagatcggacaatactgtacacgggagtctaaaagaacggccattttcgccgcagacaccggacacaaacgaccgtacagatatagataaaacaaacaaatatactgctgctgatgatgcagtggatcacattgcgaagcggtttacacaattacggtcggctcaagaaggacgcaccgtgtatccttcctcaagagattatcaagccatcgcccgcattgttgccatcggcgttcctgtcacgcaaacaatcaaatggcttgaagaatgctttcaggcttttgaaaaccggcggaccgccgcttctgaaacaatcaaggcttttcgctactgctcgaaattcattgaagatcgatttttcgcgcagcaagccaaaaagaatgccgcaattcagcatgagaggatgaaaaaacatgacaaaacgaacaatcgaacagattttggacgagctgagaagagggagacgtccattactggcggacaaaccggccgaatcagacgcaagcaggtatgattgcctgcgctgcaaggatcagggaggttatctcgtcaggcagaatggcctggaagtctggacgatgtgcagctgcatggcagaacgaaaagtgaagcggctgctgggtgcaagtgagattacccacgctttcagacagctcggcttcaaggaattccgcacggagggaaagccgcaggccataaaagacgcatttgagtgtacaaaagagtatgttgccgattatgaacaaatcaaggattgccgaaaaaacagcattgcccttttaggacagcccggatcagggaaaacacaccttttgaccgccgcagccaacgaattaatgagaacatgctatgtgcctgtcatttattttccgttcgtggaaggctttactgatctgaaaaatgattttgccctattagaagcgaagctgaaccggatgaagcaggcggatgtgctgttcattgatgatctgtttaaaccggttaacggcaaaccccgcgctacagattggcaattagagcaaatgtattcggtactcaactatcgctacttaaatcataaaccgattttgctttcgagcgagctgacaattgaaggacttgtacgggtcgatgaagcgctcggcacgagaatctatgagatgtgcagtgactatttagtgattatcaaaggagcagcctacgagcttaaccatagattggagggcgtcagataatgtgtaagctttgtcaaacaaagaaagtcattgtggaacataccggtattggagttgtttttcatccatgtccgaactgccggtccggcactgacttaacgcctgtcattcaaaagctggagcaaatgctgacagcgggaaaagcgaggctgaatatctatgattaaacagctgactgctctaatcgctttgctgtttcgggcaaagcgaacagaaaaaaacattgaacaatggtataaggacgacgggaagtgaaagtgttggcaaagacaaaacaggcagagaaaagccctgcgccgtggcgtgctgtcccgtgcggggatacgaaaccgatctatatttattcagcttacagtgaagaagaaaaagaaagatttccgtactcaaacgggcggctgattgcagctgtatttgacctcagctcttattcgcaaaaaagcaatgcctctttgatggccgctgcgcctgaattgctggaagcgtctaaagcagcacttgattttctgaaagggaattctattcattcaaaggagcgtatcattcagctattagaaaaagctgaagcaagcgctgcaccgaaaaggggaggaaataaaacatgattcatccgaaaaaactgctgcatatcgattccgtcacgcttaagagccagctggaggacgggaaaatccgtgtcattattgtggacggcatcaagcaagaagcatggatcacagaagcgccagagcatggaaaaacgctcgtcgaaacaagaaagggcgatcttgctcgtgtggaatttgaaatcggctacaaattaaattaaagcgaaaacagaatacgtccaagacggaaagcctgcggacactgatcaactgcacagcatttgtgcgttgattggtgtccgttttttatttgccaaaaatgaggaggatcatagaatgcaagacttactatttgaatataaacgcacgctcaaacaaacaagaatacaatataaaccgctcgctgaggcagatgaatccgtgctctcagctgaagagctgaaggataaaaaaatcatcagaaatatgattactgatcttgaatatgtaacagaatggcttgaaaaaggaaggcagcccggcatcagacgggcgattgaccggcgtgatgtttaccagcggctgatgatcaaggacccgagaatcatcgaatcattttccagcgctatgatgtttgagccggacggacaggtatcagaagaagacagagatagaattcgagaagcattagccctgttaacggacagagaaaaggaaatgtttttgctgcataaggtagaatgtttttcttatgaacggatcgccgatcttctcggcgtaaaaaaatcgacagtgcaaacgacgattaaacgggcgagtttaaagatgcaaagacagcaggaagaaatgaatcgatcacttgcctgaaagcttgtcatacgtttgccacctataagtgaatagagcatgacactaagcggctggctgatcagccgcttttatgaataaacaaccatgctggaggtggcggtgatgcagtagcatgaaaacacaacagcgcgaacaagcattagcaatctatcaacaacatcaaggaaagatcacaaatcgggcgattgcggacacaatcggtgtttccgcgaaaacaatcggcatctggaaaaaacaagacaaatggaaagaggcgctgttttctgcgtccaaaaacgaacaaaaacagcgccctataaacaacgatgaattaaatgaacgccagcggctgttttgcctgtattacgtcaaaagcttcaatgccacacagtcagcaatcaaagcgggctattctccggacagcgctcatgtgacgggcagccgactcttaaaaaacgaaaaggtcgctgctgaaattagacgcattaaaaaagaaatggtcaatgaaatgtttattgaagcgatggatgtgctgcaggtttatatcaagatcgcgtttgcggatattacggactatgtgacctttggaaaaaaagaggtccaggctgtcgggaaatcgggtccgctgtttgatgaagatgataatccgattatgaaggaaatcagctttgtcgatgtcaaagactccgggctcgttgatggcaccattgtaacggaagcaaagcttgggaaagaaggcattgccatcaagcttgcagataaaatgaaggcgcttgagaagctatccttatattttgatttgtttccagatcaatttaaacaaaaaattgaaaatgagaaattgaagcttgccaaacaaaaagcggagaaaacagatgacagccaggagccgattgaaattatgatcaaacgaaaagagcgcaagtcatgattgtaaaagaaatcaaccctcatttcgaagattacgtgttcaattgggagcagacgtaccagtttcttgtcggcggctacggctcatccaaaagctatcataccgcattgaaaatcgtgctaaagctgctgaaggaaaaacggacggcccttgtgatccgggaggtgttcgatacccatcgggattcgaccttcgccttgtttcaagaggtgatcgaagagctcggtctcacaaaggccgtggcatctctttcttccccgctgcagctgcgatttcacaatggcagccggatcatgttcaaaggaatggacaatccggcaaaattaaaatcggttcataacatttcattaatatggattgaagagtgctcagaggtgaagtatgaggggttcaaggagttaatcggacgtcttcgccatcctgagctaaagcttcatatgatctgtaccaccaatcccgtcggcacctccaattggacgtataggcatttttttcgggatgaacgcaagaaacggtttgtgctggatgacagcgaactttacgaaaagcggacgattgtaaagggagatacgtattaccatcattccaccgctaacgacaatctttttctcccggaaagctatgtgaaacagcttgacggactcaaagagtatgatcccgacctgtaccggattgcccgaaaaggacgattcggcgtcaacgggatcagggtgctgccgcagttcgaggtactcccgcatgatcaagtgaaaaaatgtatcgcagccatcagcaaaccaatctttcgtacaggtatggattttggattcgaggaatcctataatgccgtcgtccggcttgctgtagatcctgaaaaaaaatacctctacatttattgggagtattatcaaaataaaatgacagatgataggacggctgaggagctgcgtgagtttattgagacacaggaattgatcaaagccgactcggctgagccgaaaagcattcaatatttccgccagcagggctttcggatggttggagccagaaagtttcccggctccaggcttcaatataccaaaaaggtaaaacggttcaaaaaaatcttctgttcggaccgctgtgaaaatgtcatctatgagctcgagacacttacgtatgccaaagataaaaacggagctctgattgaggatgaattcacgattgacccgcatacgctttctgccatttggtatgcgcttgatgattatgaggttgctgatatgaaagagacagcacacaaacgaatgcggccgaaccgagaaaggaggaggtcataaatcatgcacaaccaaacagtcagagcaactgtatttaaagccaatgccgcggctcctcagacaaagcaaatctatgaagatgacttttctgagctgtacggagaggacattattgctccgccctataatatcatcgagctcaaaaccattgccgaatactcgaccattcttcagcaatgcattgatgcgtacagagtgaatattacaggctttggattcgatgttgagtacacatttgatgtcaacgcaagtgatgtcgatcaggcaaaaaagaaaagagcggaaaaagactgggccagactcgaagccttttataaatgtcttcactttgatgaatcagctgaaatgattttaggctatgccatcgaagacagagaaaaaacaggcaacggatttatggaagtgcttcgcgacggggcgggaaaacctgccggcatcgaatatttagatgtgaaatatatgcgtgtatgcggagcaggcgagcctgtagaggtttcatttgtatatgaagaaaacgggaaaatgaaaaggatcaaaaggcaaaaacgcttccgaaaatatgtgcagatgatcaatggaaagaaagtattttttaaagaatacggcgatccgcgaaaaatggatattcgcacaggtgaatatgtaaacacattggcagagaagtatcaagcaaatgaagccattcacctcaaaatcggaagcggcgtatacggtgtaccccgctggatcggcaatattgtcaatttatacggggcccgaaaagcagaagagctcaattttatgtattttaagcaggggcgtcacgtccccgctgcgattacagtggaaaacgggatgctgtctgaagcttcttaccgggagctgcaggaatacatgaatgatcttgaaggcgtggagaacgcccataaatttctcctgatcgaagcggaaggaatcgcaaaagaaaaggatctccacggaggcgaggatattacgccggtttccgtggaaatcaaatctttggctgaaattctccaaaacgacgccttgtttcttgaatacgatgaaaaaagcagaaataagctgcgttccgcgttccgtctcccccgctgtatacaggcgaggcccaggaatacaaccgggcgacagcggatactgctagaaaaattacggaggagcaggtttttcagccggagcgaaaaactctcgtgaataaactgaacacgctgcttttgccggagctgaatatccatgacgtcaggctgacattaaaaggaccggactttcgtgatccgcttgagattgcgaaggtgctcggtccttttattacagccggagcagtctcgccgaatgatttacgcgaccttgccggacgggtgcttggcaaaacacttgaggagtggccggaggacatttataaacggcctgcaggacaggatgcggaaaagacaaacctggctgcgctcatgcaggagctgaaagaaagcatcgaagatatcaaaacgtcctgaagggaggtgaatcaagcaggtggcgcgagaattaagaaatgccaaaatcagctttgtcagttatgtggacaaggcggctaaccagacagaatttttctttacgaagtcagccgaacctccgtcatttgaaaaaaaggttcggctgtttacaaaaagtgagcaggatgaacaaaagctcgtgtacggaatcgtgtatgagcctgatgttcctgatgcccacggcgattttatgaccgccgaggaaattgaaaaagcggcgcacggttttctcgcggaggcacgggagattgatatcaatcacagctttgagggcggaaccggcgtcgtggtcgagtcctatgtggcgcccgatgattttatgatcggatcaaagcggattacaaagggctcatgggtactcgtgacaagagcgtctgacgaggtgtgggaacagattaaggctggaattatcaccggctacagcatggctggcactgcagatgtgtatgaagaagaaccggtcgaaaaagcagggttctttagtgtattcaagcaaatgcttgctgacaaaacagggaaggagactgaagaaatgagaaaagaagacatgaaagaatcattcgagcatgcgctttaccctctgctcaaacggcttgagcggattgaaaaaaacacagacacggaggaaaagccggagcagacgggtgatgacgagcgtctgaaaaagctcgttgaagacatgcttgccccgctgatcgaacgcatcgaggctttggaaaaagcgcgaggcgcgtctaagcagacagcggacgatacgggcggcaatacagagcaagtcaaaaaatcaatctggagcggactgctgtaaaaccagtcaaggaggaggaaatcaattgagaaatcaagagatcattcggaaagcggaaatgtcgctttctgctttaaaaagcggcgggcttatgaaccctgcgcaagcatcggcttttatccgcatggtgcaaaacacgccgaccattttcagtgaatcccgcgtgattcaaatggaaaacgattcgcaaaaatttgaaaaaatcggcttcggccagcgtattctgcgggctgcgcaagaaggaaaagcactgtcaaacgacgagctgacagttccaacgacaagcactgtccagctgaacacgaaggaagtcattgcggaaatcaacattacgtatgacacacttgaaaacaatattgaaaaagacggcctgcagcagacaatcatgcaaattttagcagagcgcgcagcagttgatattgaagagctgatcgttaacggcgatacagcatcagctgatccgtatctggcacagctggacggcatccgtaaacaggcggtttcccatatcgttgacatgaacggtgaagaactgtccagagcgacattcaagaagggcttaaaggcagttccgccgaaatatttgcgcatccctcaggaattcagattctatacgtctcacggcttagaagttgaatggaaggaccgcgtggcagaccgccagacaaaccttggggaccaagctgttcagggcggcttgtcaacagcattcggcgtaccggtcaaaggggtatccaatattcagccgtacacagtcggtgagggagacgcgcaatatgacgcttctgatatcattctcacacatccgaaaaatatcattctcggcttctcccgcaatatccgaattgaagtcgacaaagacatccgctcccgtaaattcattattgtcttaacggccaagctggacagcaagttcgaggaagaggatgcctgcgcgaaattaattaacgtaaaagaataatagaaacgaggtggtcagctcatgctcattgaaccgactgacgtagcttcctattcggtctatgatcgggtgaaaaacaggccggaagagctgctggcgcaggatatcatcgaggcggaagcagaagcggctctcatcacgggccaccgctttgaagacagcttgtatgatccgctgcccggcaaggtgaagttggctttagtaaagcttgcccagtattttgcgcttgtcaacagcgatgaatctgcctcatcaagctatcagtatgagaaaatgggggattattcctacacggtttccggagaaggcaggattcagcggcctgaggtgtatcatttgctcgaagagtttattaagccgggctacgtccctgaatcctccagactgaaggtgagatctttatgagctacaggcagatgctcattcaccgctgcgatatttatcatgaagcagcgcaagcgccgtctgcaggccgatttgggattccggcagacaggctgcagccggtgatttcatatccggatacacccgatgaacaagatgtcccttgttattttaccgaaaaaacacagcagctgattcaggaggagccggatcaaactgtatatcatagctttctcgtccattttccgttgtcagcggacatccgcgtgaacgataaaatcatttgggagaatcataaatatatactaaagctgccgaaaaggatcagacatcatcattgggaggtcgtcgcagtcagggatgaaagcctatgaaaatagcgggattgaaacagctgaacacggcattaaaagaagcggcttcaggcggtttttccagacaggcgtcccggtggcttgaggagtgcgggcaagattttctagagatcgtccaatctgaactcatcagcacacaaacgattgatacagaaaaactgctcagttcctttgagaaaggcgcagaggacaatctctggattgtgcaaagcggcgggctttcgcttgaggtggggacacagcttgattacgcctcatttcttaatgacggccattggacgtcaaaacaagatgtgagatgggtgccggggcgttttcaaggctcacggtttatttatgatccagcggcttcaacgggaatggcgctcaagagaaaatggataccgggcacgggctactgggatcatgcactgcttttatatgaacagctgtttgaaaaatcgctggaaagcaaactgcgccagtggctgaagaagctgtaaaggaggagcaggatgaacagtgaaacaggatcgatcatggcgtttttgtacagccggtggtctgttcccatttatgaacgcgagcttcctgatcactttcaggtgccgtcgttatatgtcccgccaccatctgttttcgaggaaacagatacggtctccacatttaaaaaaacctacagtctcaatgtgaaactgtttcatctggactccgttcaggcgctggatgaagcggacaggctcgcggatgccatcagagaagcgagaaatatgattccgctgctgagtgaatccggcgagaagacgggggatatggttcgcatctcccaaatcgagacaagggtaggggacaggggcgaggcggccatggtgatcaggtggagcagcagatattattatcacaaaacagaacagcctgtcttacaggatatcgacatgaacagcggggtgaaataaacggtgtcaaaggacaaacaacagaagaaggctgtacatacaaagagccgggaagctctatttgatacagcggatttgattaagcacgcgaaggaactgttcggcgttaagccggatattcttcagggggctttatttggcgtggatcaaccacgtatgacgaaatcagaagccaaccaattgattcaaacatttctaaccaaggaggtcatgtcatcatgaatggcggaacatttacaacaggcaaagaaaaagaacgtgcaggcatttattttaactttaaaacgacggcacaggagcgggtatcactcagtgaacggggaacagtcgcacttccggtcgcctcaagctggggcgaagcgaaaacgttcgtctccatttccagcgttgaagacctaaacaaaaaagtgggcctcagcattgatgacccgtctttattgctgctgcgtgaagcgaagaaaaatgcgaaaacggtattgatgtaccgtctaaccgaaggtgtccgagcgtctgctgatattgctgaaggcgtcaaagcaactgcagtatatggcggaacaaaaggaaatgacattatcatccgcatcaatcaaaatgtgctggatgctaattctttcgatgtgacaacatatatggacgaatcagaggttgataaacagactgtcaaaaaggctgaagaattaacagctaacggctatgtcacttttaccggaacaggcgatctttcttcaacgattcctctcactggatcagaaggagacactgcagctgagacgctgaatgcatccgcgggcatccgtttatccggcggtacggataaagcccctgtcaactccgactatacagatttcttagccgcggctgaaacggagagctttgatgtgattgcgctgcctgttgcagaaggtgaccagttgaaagcgacgtttgctgctttcattaaacgcctgcgcgacggccaaggacaaaaagtgcaaggcgtcacagccaattatgccggtgattatgaaggcatcatcaacgtaaccgagggtgtgctgcttgaagatggcacggaagttacaccggacaaagcaacagcttgggtagctggagcgagtgcaggagcaacctttaaccaatcacttacatttgtagagtacgaaggcgcagttgatgtgttacaccgccttgaccacgatacgattgttgaacgtctgggtaaaggtgaatttttattcacattcgacgcccgtgataaatccgtcagcgtagaaaaggatattaactcactcgtgacgttcacagctgagaaaaacaagaaatttgcgaagaacaaaatcgttcgtgtcctggatgctgtgaataatgatttaacacgcgagctgaaagccttaattaaatcaagaaaaggcagcggaagcgatatcccggcatctgaagacggactgcagtatgtaaaaacgatgatcacacaatacatgacaacgcttcaggacgcaggcggcatcactggctttgattccgatgaagatatcacaatttcaatgaatgaagatcgtgacggcttcttgattgacctggctgtacagcctgtcgacgcagcagaaaaattctactttaatgtggaggtaaactaatatggcattaaaagcacaaaacacaatctcaggaaaagaaggccgtttattcctcgatggtgaggaaatggcacacatcaaaacttttgaagcaaacgtcgagaaaaacaagtctgaagtcaacattatgggccgccgcatgacaggccataaaacaacaggggcaaatggaacagggaccgcgacgttctacaaagtcacatcaaaattcgtgctattgatgatggactatgtcaaaaaaggcagcgacccttatttcacgctccaagctgtgctggatgatcaatcctccggccggggcacagagcgagtcacgctgtacgacgtcaactttgactctgccaaaatcgcaagccttgatgtcgattcagaagcgttagaggaagaagttccatttacattcgaagacttcgacgtccctgaaaagctatctgacacgttttaatcaaagctgaatcagcccatacgcagacctttctcagaaaggtctgttttttaaagatgaaaccaaacaatagacaagggagtttttttacatgagcgagaagaacgaaaacgtatatgatctttccttttttatgccgggaaaaacaattgaagctgaggaaatcaaagtgccgatctcaaagcgttttgttgataaaaaagggaatgtcattccgtttattttaaaaccaattactactgaacggattgatgaattagagaaagaaaacaccacatttaaaaatgtgaaaggccgcggccgtgtcaaagatttagactcccagcgcttttatgcgagaattgccatcgaatctactatttatcctgattttcgttcaaaagatttaagggaagcatacaaaactgcggatccggtagaagttgccaaacgtgtattatctgttgggggagagtatgcgaactggctgaataaagcaattgaaatcaatggttttgaagatgatcttgaagatctagaagaagaagcaaaaaactagtaaaggatggcgataaggaagctgtgtatttgtactatgcaatgcatgagcttcattactcgccatcccaacttcttgaattatatgaagcaccaaaacattttaaagctcttttatttgggttgataggttataagctagatctattagaaaaagaatcaaggagaggagggaactaatatcgcaaaattaacagcccgttttgatctcgaagacaaggtatctaaaaaactaaaacggatacataaaggattccaagaggtcgaaaaaaaagtcaaaaccattaatcggcaaatcaaaatcagtatcagagcggaagatcaggcattttaccggctgagaaaaataaacgactatatcattttgaaattcgcgaaatcgcttgaaattaaagttgtacttgatgaccaagtcacttcaaagcttgatgcaattgaaagaaaacttaaacggctgccgaaagaaacgaagctgactgtctctttggtagatcggacagcagctgcgtataaaaaaataaagaagatgctttctaatcaaaagctatcattccttttgattccagatgacaaggttacttctacagttaaaaggattatcggttatattaagaaaaatttgaaaaacggatacacagtaaaactaaaggtcatcgatgaaatcaccaaaacagttaatcgattaacagcccttctaaggaaatttgaaaaaacctattatgtaaaagtggttgttaagacaaaaatatcagacaaaatcaataaaaaagaaagcctgattaacaaagaaacttctaagaaagaatcagacaaatcctcagataaaggctctgataaaaactcagatcaaaaacctggatgggtcggaaaaataaaaggctggctgaaggattggtggacaaaatcagcttggccttggatcaaagatacgctcaatgaaataggcaaagcttttttggatcgtttcaaagagagattgatagaaaagctgaaaaatgatgtgtttgataagatcattgataaaattctaggaccacaaaaaaaggacgattctggtgaaaattctgacacagataaaaaagtccttaaccgtaatacaggaggaaattgttgctgtgactgctgtgaaggcggtatcagcccgggcactaaaaataaaaaaacctatagaaaaaagaaaagtcccacaaaggctccaaacagaacactcaaggttcctggagaggtgataagaagacgccagagcggcacacctgctgaaagtgcacctaggacctcgggttccaagttaaagaactggcttggaggcttaaaatcgctagggaaggattcatctaaactaggtaaagcgttcagaggaatgggaaaggctgttccatacgtaggatctgctttagcagtgtttgatttagctggaatcaataaagataatgctggcgaaaaggttggttcaattggaggacgtattgccggagcggaagctggtgcaacagccggagcggaagctggtgcaacgattggatctttcgttggtccggaaggtacagcaatcggcggcgcaatcggcggaattggcggcgggttagtaggcggaatcggcggcgaagaagcaggtaagaacattggtaagatgtttgatacttctaagttaaaggagagcataagcaattcactatttaacaaagagtggtggagtggaaaatggaactccatttctgatactgccaatggggctattacttggattgaagatacatggagtaaagtttcaacttggtttgaccagtatgtgtttacacctatatataatgttgctgtacctgtaattaattttatagtaggattgtttgcctatgcctgggatggcatattggcagtatggaacattgtctacccgtggtttaaggataacgtgtgggatccaataagcggagcagttactaatgttgctacaacgatatggactggattgtgcaacgcctggacggttatttcaggcatatggtctactgtttcaacatggtttatggacaatgtgtggaatcctgtaagtgaagccgtaaccactgcggcaacatggatttggagtaagatcaatgatgcatggacaataatttccaatatttggacaggagtatcgaattggttttatgataatgtatggaacccgatcgtcaaaaaagtagaagatattaaaacttcaataaaagaaaaattcgatgatgcaaggaaattttttgaggatgcatgggatggaattgaaacttggtttaatgaacatgtgaaagatccattggttaaagtatcagagaaaattgctgagaaatttcaatggctattcgatttaaaagattcagttggtggtttcgttgcaaaagtaatacacaggggggaagaagttactcacctcaagaaaaaaccaatcaaaaaggattcgaaagagaaaaaaactagttccaaaccaactactaataacatttttgctcaatctccatcaaataataatatgactgtttttcaacaagcactagatcagaacgccacaggcggctacatcaccaaaccaaccatctcgtggatcggtgaagccggcaaggaattcgttatcccggttgataacaaccgaggccgggggaagatgcttctttcacaagcggcgtctaagctgggtatgcaagttgtagacgacatgggcgcagcttcgtcttctggcggaagtccagcatctgtttcaggaggagcagctgtcagtcctctatcaggcacagcctccccagtaatgaacactgcaaatcttacaggccaagcgtccacactcggacagcaattttcagaaggctttggtaaaggcatcagcgatcagccggtcaaaatggaagactggaaaaagaaaaacatcaatacaccatttacacaaatgatttctgcttcaccaaattacggtaaacaaatggtaagtgggtatgccaagggccaaagcggcactgcaaccggaacagacggctttttgcaatcaaaagttaaaacgccgttccaagccactgtgagcaaatcgtcttcatggggcacaggaacggtcaaaggctttgcgcaaggacaaaattcaacccaaacagggactgcacagtatgtgagtacacatgttgacaaaccgttcctgcgttcaaaagacacatcgaacagctggggctccggtttgattggaaactttgtgacaggcatgaattctaaatccagtgaagtaaaacaagcagcaaaggatatggccaagagagtggagcaggctttccgtgaagaattagatatccattcaccttctcgagtcatgatgagcttggggcgttttgcctctgtcggtgttgtaaaaggactggattctgtcgatgtgaaaaaatacgcagaaaaacaagccggttcattggcagctgcttattccggaatgggtgcagtagggggaaatgtgaaacagtggcttatggcagcaataatggccacaaagacaccattgagctggctctcgggattaatgacgattgcacagtatgaatcagggggcaacccgaactctattaacctgtgggatagcaacgcgaaggcgggaaatccatcacaaggactcatgcagacagttccaaccacatttaatgctcataaagcaccgggcatgggtaacattagaaatccgattcacaacgctgctgccgcgatcggctatatcaaaagcagatacggctcaattgataatgtacctggcattaaaagcctgaaacgtggcggtccttatgtcggttatgcaaacggcgggctgatcacgaaagaacaaattgcccgtgtcggtgaaggaaacaagcgggaatggatcatcccagaggaacggggcatccgcggtcgctaccttcttcagagagcggcacaggctcttggtatggaagtgacagatccgtctcaatcccagcagtctgagctttcttcaggacaagtttcagctgttacctcggctagccggccgactgcagcggtttctggatcaaaagagatttatattcaatttaacggtgaccagcacttccataatggacaagacgccgaaagcctagcggcgaagatcaagcaggcgcttatagatgaactgcaaaaggatatcaatattggaacgaagggagtcgttgcatttgactaaatccgtatatgaattttggatttcacaagggaaggacaagctgcggctccccgttcttcccgaccagctgagtatttcaaatacagttcagaatgagacggttaaagtagccaagttcggtgaccttacatttattgacgagcagggagcgaaagaaatttcgttctcttctttttttccgaagaaatacagtccgatagcagaatatcaaaacttcccgtcgccggaaaatgcgataacaaaaattgaaaaatggatgaaggccaaaaaaccggttcagtttttgattacgggaactaaagtgaatttaacatgcagtattgaaggtttttcctatagcgaaggccagcaggatataggtgatcgttcctttgatattcaattaaaagaatacaaaaccgcttccccgcggaaaatcaagcagaagaaaaaaacaaaggcaaaacgtccgtcgaaggctgcgccgaagacgtacacagtgaaaaagggagacacgctatgggacattgcaggcagattttacgggaacagcacccaatggcgcaaaatttggaatgccaataaaacagcaatgatcaaacgaagcaaacggaacatcaggcagccgggccactggatttttcccggccaaaaattaaagataccgcaatgaaacaggtgatgtatgatgatagaactgttcgtcattaaagacacagagtggcttgagctggttgcagaaagcgtatcgcttgaaggccatcgttatcaggcgccgcgttccattgaagcaaccatcgtcaccaagcagggcgaccagacgtattacagtgtctcagaaggagatacggtcttgtttaaatggaagggaaaagagctgtttcggggcattgtttttgcaagaaccccggacgagcatacgcttgccttcagcgcttatgacatgctgcagtacctggtcaaaaaccaggatatgtacgtgttttccaatcagcgggccgaccagatcatcagaaggattgcgagtgacttccagataccgacaacctcgatcgcaaacacaggccatacgatcaaaagtcttgtcattaaaaatgatacgacattgtatgacatcatattaaaagcgctgaaacagacgaaaagccagacaggacgacattaccagctgtattcggaaaaaggaaagctcggcctgcgcgcttggccagatccgtcagaggtatgggtgcttgaaacgggcgtcaatatcacgggctaccaatacagcacttctataaacgacactgctactcgggtggtgcttcgccggcagaaggacaataagacatataaagcctctgccaaggacagttcaggcttaaataaatacggtgtgcttcaatatacggaaacggtcacagatgacatcaaccaggcacagcttcagcagcgggcagatgtacgccttgctgaaaaaaagggcgtgaaaaaagaactgaaaaatattcaggcagtgggcatcccagaagtgcagagcggcttgcctgtctatatttcgattccggaggccggcatcaagaaaacctattgggtagatacggaccggcatgaatttaaaggaacgaaacatacgatgacgatcgatgttgtcgaaaagaatacgatgccggaaggagtttcctgatgagattaagtgaggctataaaacatttggcagtcggcgcagttgacgctgagtctccggtagaactgctcccggctgaagtcgtttcggtttctcctgtggaaatcaaattaaaagaaaacagcaaactgatcataccggaagacgccatcattatcccaaaacgaatgcagtccggaggagacgatgcactcgagccgggggatcgcctcatgaccgcggctctgactggcgggcaatcgttttttattttagataaggtatagacaaaccgcttcagtacgaaggggtttttatttagcatgtaaaaggagtgggcaacatggccctgacaccagaagtggagtttgaagatattgaagttgagagcgaagtcattgaaacctcgcaaacgtacaaaatagattttgaaaacggaagaattacgaatgagctgattaccgggcttgaagcgatcaggcagttcgtgtatatcgccttacagacagaacgctatgcatattccatatacagccataatgtcggaaacgagcttcaggacgtgctgacagatcatgagacgactgatgcgtataaaaagatggagattccgagactgatagaagaggcgctggtttatgatgaccggatatctgctgtaacagattttgagattgaaaaacaaggcgacgcgtttcatgtgtccttcgtggtggagacggatgaaggaacgcttgagattgaggaggtgattggcgaagatgtttgaagatcagacttttgaagcgattatggagcgtatgctgaacagcatttccgcagatattgacacaagagaaggcagcgtcatttataatgcgttagccccggcggcggccgagcttgcgaagtcttatatatggctggatactgtgcttgagctagttttttctgataccgcacaaggcgaatttttagacaggcgtgcagcggaagcgggaattgaacggacagccgcgacaaaggcggtcagagcgggagagtttacatctggagttactattcctgtcggctcccgcttttacgtggataatctttattttcaatatacggcagacgggacgctcatctgtgaaacacctggtgaagcgggaaacgccaatctgaccggacgcaatttactgtcattggataccattcccggtttagaaacggccattgtcaaagaaatcctgattccggggcgcgaggaagagggagatgacagcttgcgagaacggtattttacaagggttcggcgtgaggccgtcagtgccaataaaatgcattataaagagtgggctgaggaagtggacggtgtgggaaaggcaaagatcttcccgctttggaacggtgaaggcacggtcaaaattgtcgtcaccaatgcgaatcttgagcccgcttctcctattttaattcaaaaagtgaaagattatatcgaccctgaaccaggacagggagagggacaggcgccaatcggagccgttgtcacggtggaaagcgcggtctggaaggaagttgagatttctgccgaagtgctgcctgagatcaatcactcaattgatgaagtgaagtcggaaattgaggaaggcgttttaaacctctttaaaaaaatggcgtttgaagacaacgttatccgcctttctcaaattaacaatatcgtctataattcaccatcagtcagtgactactccaatattcaaatcaacggcacgtctgaaaatctggtgctgagcgacgtggaaattcctaagcttgggcaggtgaagatcattgagcaaacaagatgacatgcgagcttatctgccgccgtttctcaccagccttaaagaaatggccgagctgctgaaagcggaagcgcctgagtttgataaacaaaatgacagcatatttgatctgacggatcagttattcgtaccgacggcgacttgggggctcagccgctgggaaaaaattttaaacgtcccgcgggaatcaggcgacactgatgagatcagacgattgcggctcatttccaaaatgtcgaacatcccgccaatcacatacagggccattgagcaggcggtaaaccgtttcttgaaaaacccgtctgcacaggtccgcctgcttcccggcgaataccgatttaacgtcgatatcaatgttgatgacctccagcacatgaatgagctgatcgaagcgatagaaaacatgaaacccgctcatttggcgtatacgctcagaggcggattgaatgagacgctgcgaatcaaagatacagtcatcctgaatcaccgcagataccgaacagccagtgagctcaaggtcggttattctgtcactcttaacaacaatgaggtggttttaacttgatttcaaccatatacagagaacgcacagcggctgatctaaaaagcagaatcgatcacgtgctgctcaacggccaaaaaacagaaatagtagagctcgccattgacggtgcgacagtcaccgttctgacaaaacgtgaggaagacatcaagcatattgaaacggtacaaatttttgacgagctgggcaatgtgatcacagagagaaagactgacctggacgtcagcgaaaacagaacactcgatttcagatttacttttgaggtggtgtaaacatggcatacgaagaaaaaacagactggcttccggacgacccaatcaacgaagatgacgtcaaccgctgggaaaaaggaataaaagacgcccacaccgacctggctgcccacaaaaacgacatgaacaacccccacaacacaacaaaggcgcaaatcgggctggggaatgtggataatgtgcagcaggcttcaaagacggaatttaatgaacataatcatgattcaacccggcatattacatcagtagaacgtgatgaatggaatgcgaaggaaacacctgccggagcccagtataaggcagatcaagctgaagcaaacgccaaagcatatacagacaattttgctgcacgaagagataatcctaaccaagtaacaaaagcacaggttggacttgggaatgtcgaaaatgtgaaacaagcctcactagcagattttgatgctcatttaagcaattctaaagttcatgtatctgaaggggaaagaaacaaatggaatgctgcccaactaattaaacttactggagacgacggtaaaagaatacaactccaagacggtacagatattcttacattatcttctggattttattgtgcagttggtcagtcagttgtaaacaacccggtggaaggcgatgcagcttggtataactacgatattgtagaaggcggttcaggaaggaaaacaatagtagcttaccaaagttggggaagtatgatgtggattggaatggttcacactgatggagaatttagaggatggaaacaaattgcaacaacagattttatagatagagttcaaacagaattagatcttcatgaaaatgataaaactaatcctcattcagttactaaacaacaagtgggtctcggaaatgttgagaatgttaagcaggagacacctgatggtgcgcaaaaaaaagctgatactgctttaaaccaatcaaaagattatactaacagcacggcctttattactagaccattaaattcaataaccgatgcaaatgatttaaatcttccgcctggcacttatcgtttagacactaattacatgaatgcaaatccagttttgcaaaatcaatttccattaaatgataacagaacaggtttattaattatctacccctctgcaaataaatgggctacacgtcaagattggtttagcatctctacgaaaacactttatacaagggtagcagttaatggtactgattattcagggtggtatatattagagaattcggaaggttcacaaaataaagcggataaagctttagctgatgctaaaaactatgttgaaacaaattatacaaatcaaaagttaactgttctaacaggatcaaatgcaatccaagatgcgagaataagcggaaatgattacaaatacggaatcacttttatggacataggggccaataacactacaggatacccgctcacttatggatttgtaaaaaatgaaaagcatagtaattatcgctttactcagtatttctatggaaatgcagacacaactagtggaagttatgatcatgtagggacttggatccgccattggtgggcagattcaggctggactgcgtggcaaaagatatcagggtttgctcacgctaatattgggactactgggcgtcaagcccttattaaaggagaaaataacaaaattaaatataaccgtattataaaagatagccataaattgtttgatacaaaaaacaataggtttgtagccagtcatgcaggaatgcatttagtcagtgctagtttatatatagaaaatactgagcgatactccaattttgaattatatgtttatgtaaacggcacaaagtataaattaatgaatcaatttagaatgcctaccccttccaataacagtgataatgagtttaatgcaactgttactggatctgttacagttccgcttgatgcaggagattatgttgaaatttatgtttatgttggttattccggggatgtaacacgatatgttacagattcgaatggagctctcaattattttgatgttctggagcttggcggaagaaattacccgagagtttaggaggtacctttatgatcttatatgatgccattatgtacaagtatccaaacgcagtatcgagaaaggattttgaattgcgtaatgacgggaacggttcatacattgagaaatggaatctccgggcgccgttgccgactcaggcagaactcgaaacctggtgggaagagctgcaaaaaaatccgccgtacgagccgcctgatcaggtggagcttctcgctcaagaattgtcacaggaaaagctggcacgcaagcagcttgaagagctgaacaaaacattagggaacgagttgtcagatataaagctatcattactttccttgaaaggagattatgctgaatgaattattgggtgcttgccctctattatgagtgggcgacaacggatatggtgaaacaggctttagcatatgaagactgttcaattcaggatctggcagagggtgtgaacaaaaagctgatcacagctgaccagtataaagaaattaccggtaaagccatgtaaggcttttttattttgcctgtttttagatcaaaggaggatgaagatggtgaagtatcaatatgaatttcctctcgataaggctggaaaagccggcgctgtaaagccctatcgaggaggaaaaaatgattttgtgacacctgtttcgaatttgtcaggcgtagcggagattttaacaaatgctgctttaaaggcgactgaggcatacagtcagctcgggcaggacaggcttggcgcagttctgatttcgaaagtgaagggctgggcgtatgcagatcgtgaaggtacgctctttatagaagaaagcgacaacaacaatgtttggacaacgacagcagcagttaatgtcgcagcaggcgtcctgacagcgacggactgggtatatctttctaaacgctattaccgtttccgctatgtgaacgggaatcttcagcaatctgagtttgtattataccaatcagtcggtgcgggtgagatggatgtgcgtgtcaatgaaaaaacgcctttacagattgactttgcggagaatcaaacacacgatggacggctgaaagtcgaggctcgcaaaacatttgactttgtctttcatgaaaatgcagagtccgccagcgagggggctgctttacctgttgacggtgccgcgcatttactcgttgaagtctacggcacagcagaaatgagcgaagtcaaattttggggcaaatcggtgtcaggacagaaactgccgatcagaggcgtgaaaactgatgatgctaccactgcctccagtacattaggaaaagctgaggcatgggcctttgatattaaagggtttaaggagatcatcatggagattatcagtatcaccggcggtactctttcggtaaaagggaccgcggtttcataatagtctcggccctcggaagggaggtgatctgcatgtgaaggaggagtgagagatgcagcaagaggcagacgtgaatgtgtttcagcaggatttagcagacatgaaaggcgagcacaaagcacttgagcagagggtttccgcattagaacgcgtgtctgaccggcaagaccagcaaatcatgacgctgaacgaaaaattaaacaaaattgaagaaaacaccacgtggattaaacgcaccatcacaggtgccatcattacagcagtgtctacaggcatcattggcggagccatcgccattatgtacagcctgctgcagcattaaagggggatttttatgaacacgtttgacaagggcacggtcatcaggacggtgcttcttttaattgctttaatcaaccagaccatgctgatgctcggcaaatcaccattggacattcaggaggagcaggtcaatcagctcgctgacgctctttattcagccggttccatcgcatttacaattggaacgacacttgccgcttggtttaaaaacaactatgtaacagaaaaagggaaaaaacagcgcgacttgttaagggacaataatctgacgaaataaggagagatgaaaatggttaacattattcaagactttattccggttggcgcaaataaccgtccaggctacgcaatgacgccgctttacattacggtgcacaacacagcgaataccgcagtaggagcagatgctgcagcgcatgcccgctatttgaaaaatcctgatacgacgacaagctggcattttacagttgatgatacagaaatttatcagcatctgcctttaaatgaaaacggctggcatgcgggagacggaaatggcagcggcaaccgggcttctattggaattgaaatttgcgaaaatgccgatggcgattttgcaaaagcaacagcaaatgcccagtggctcatcaaaacattaatggctgaacataatatcagtctcgccaatgtcgtccctcataagtattggtcagggaaggaatgtccgcgaaaattgttagatacgtgggattcgttcaaagcaggaattgggggaggcggcagccaaacttacgtcgtgaaacagggcgacacacttacatctatagcgagagcatttggtgttacggttgctcagctgcaagagtggaacaatatcgaagacccgaatcttattcgcgttggtcaagtattaattgtaagtgctccatcggctgctgaaaaacccgagctctatccgctccctgatggtatcattcaattgacaacaccttatacatcaggagaacacgtctttcaggtgcaacgagcacttgcggctctgtatttttaccctgataaaggcgctgttaacaacggaattgacggcgtttacggaccgaaaacagctgacgcagttgcccgttttcagtctgttaacggtctaactgctgacggtatctacgggcctgcgacgaaagagaagatcgcagcgcaattaagctgatcaaagaccataaaaatcccggagccgctccgggatttattttttcttcttcaacttttttataattccagcactgcgctccctcacccgaagcgagtacccggaaagcccaaaccttccgtaatcaacaaacttcacacgcctcaccaattttttcactgtatcacctgacattatcctctgtttgtatttattatatgtcaccctttaagaaaaggaataaggacaagagctgttttcccttgtccttttagtgtgatcatgctttttttcgtttatactcgtcaatcagccgttcgttttctttgaagattcttgctgtatgcggactgacttgatagcttgcgacactggtggttgaacgttttttcaggattttaaacggcttcgccgctctgggctcgcatctgttttgaaacgcacgttccattatccttcaccttcctcctcaattggcagcaccaaatcatatatgctcgttaatgacgtaaatagcaaataatcaaattccgtgacaatgctgtcagacgtcagcttgatgacatagttctgtgtctcgatggtaaaagggatgagaaccacttttccgtattggtcgtaataaacatcctttcgatcgagccgtgtttgtacatctgccggatcatccatatgctcggttaaccggtctttatcagcctgtgtcgaatagtggcaaagagaagccgttaagttcattttatcagcataggttttcagcagcttatcaataccttcagcataagcatctatacttccataataaacatggatcggttcgtttttcaataggtattggtatgttttcagccgattgagatacatgtggagcatttcgttgttttcttcaagaatttctcttgtgtctgtttcaagctcgctgccggccagttttttgacatatgcacttaagaagataaaagcatcaatcaaagcaaaactgactgcgacaatgagataccgttcccagtgggtaaatagggaagtgggctcatatgtccagtataccatagcgcccagaacaaacagcaaataccaagttttccgaatggcggacattttttctttgaccttcgcttcgaaacgccacgtggcatacacgtataaccccagtccggccacgatgcaccagaccatgatctgaaagaataaaaccatattcgaatccctcacatctgaaataggttctgcttattgtattcgagagatccggatggttttcctgttccatcaaaaaaaccgctcctttgacagaagcggtgtgacattaaaatatcatatttaaaataaagtaggcgatggcaccaagtgtcgctgaaatcggaagcgtgatgacccatgtaatgagcattcgcttggccgtaccccagtttacgccttttacgcggtgggacgcaccgacgccaagaattgatgaagaaatgacgtgggttgtactgaccggcaaatgaataaacgtggcgccgaaaataatggctgctccggttaagtcagcggaaacaccgtttaccggacggattttcatgatctttccgccaacggttttgatgattttccagccgccgattgatgttccgagacccatggctgtcgcgcaggcgaattgcacccaggtaggaatatcattagcagaagtatgtaaattcgctgtgatgagagccattgtgataattcccattgctttttgcgcatcgtttgttccgtgtgtatacgattgcagggcagctgttacaatctgcactctgcggaattgcttattcgttttcgccaagttgctgtctttgaaaatcagcttaacgatgctataaagaataaaaccaaggacaaaggcaataattggtgatagaatcagtgcttcaatgattttaatgaagcccttatagtttaacgctgcaaatccggctgccgcaatggctgcaccggcaatagcgccgatgatggcatgggatgagctgcttgggataccgtagtaccatgtgataaggttccaggcaattgcagcgagtagcgcagccaaaatgacaacagagccattttccagcgtataaggatctacgatgtctttcgtaatggttttggcaacacctgtaaacgtcattgctccgacaaagttcatcacagcagccaatataatggcatggcgcggttttaacgcttttgttgataccgaagtcgcaattgcgtttgccgtatcatgaaacccgttgatgaaatcaaacgccagagcacaaatgactattagtatcgttaatattaatagaatatccatttttacccctcgttacgcgtttttcataatgatggtttcaagattattggcaacactttgacaagagtcggcgatttcttcaagcgtttcgtatatttcacgatattgaatgactttgattggatctgtttcatttccgaaaagattctttaatgattttctgtgcaagttgtcacaactgtgctcatactctttaattttgattgcgtgaggctgaatatcctttaagcgattttctgccagcagctcgatcgtaatcaaaatctctttcgcacattctctgatatatccgctgaatttatcaatatgctcgtctgatgaagtaattgagaaaatctccatcatggcagagaaatgttcgattccgtcaagcacatcatccaagctgtttgtcagctgaaggatatcttcgcgctcaataggagtgatgaacgctttgttaagctctttaatcatgacatgaacatgattgtcaccttttgtttcatattcctttaacgtatctgcaaattctttaagagtcgtttggttagtgaccttaaaattcacaaaatattctgcagtttcgtctatgttctttgcaatttctgttaaaaggagtgagaacttatctttttttcttcttatcattaaaaaccctccatagtttgaatgaacaatgcacacatcaaattattatatagccttttgtcgaaaaaaaacaggtaaagtcgaaaaaaacgtatcttgacttttttgataaatcgtgtctccttattttgacctacttcgctttaaaaaaacgacccaagtttgcaaaaactttctgcttaacgtaaaaagtatatcaaaagttgtgtttttcctgtcaacttttatcttctgtttcaccaaaaaacggttccctaaacaagggaaccgttttatcagcttgcttttcgttttttcatcccgtaataaacaggcagtccggcaaggccgatgaggatggataatccgcagctcattgtatctgtaatgagtgtgctgcctaacacaaagaaggagcccgcgattgccagaattggcataaatggataaagcggaacactgtaggcgcgcttttctccctttgctcgcttgcggagaataaacactgcaaaaaaggccatcacataaaaaatgtagatcatgaaaatggagatttctgagagcttatcagggttgctgatcagcatcataatcaaagccaaagcaatttgaaaagaaatcgcaatccatggtgtgcggaacgacgggtgtacatgtgacagtttttcagcaaatggaagctgtttgcgttccgccattgcaaatgaaacacgcgggaaagaaagcacctttccatttaagcacccaaagatgctgacgataatccctacactgatcagctttccgccaattgaaccgaacagcatggttgcagcggtgcttgtcgcattttcaccaagcgtgacaatttcgttcgctgacaggatgtgaagcaatgcaaaattaatgaaaatatagatcgccgttacaattaataatccgcccgtcatagcgcgtggcagcagcttttcgggatttttcatttctccgccgagagcggcaaggagaatccatccgtcataagcaaacaacgtagctaaaatagccgccccgaagttcatatcagaaatgctttcgtttactgctgtgaagatgtgctgatcgcctttccaaaggccaaagacgatgatgcaggcaatcggaatcagttttccgatcgttgtcagcgtttggacaaaaccgccgtattttgtaccgataatattaatgacgcataaaaagagaactgctataattccaatgacttttgatagtccagatccccagccgaaaagattcgccattaaagatccaaaatataaacccagcgcgccaataatcgccgggccgtaaatgataatctgcacccagccgcacaaaaatccccaaaactcgccgtacacttcttcaaggtacgtataaagcccgccggtttttggaatctgcgttccgatttccgcgattgtcaaaccgcccgccagtgttaaaataccgcctaacagccaggcgaaaagcgccatttttgaatcacctgaataagcaagcacagcgccgggcttcataaaaacaccagaaccgataatggttccgatgacaagagtaagggcaaacaagaggcctatctcttttttcaaaccgttgtcttcagtatgcatgtccttaacctcctatgatgttgaagcttcatgttgaagaatctattttttcatattgtaaaccctattttagaaaagtgaaataaaataaattttctgattttcgaaatttgctttgtgtacagcagataaaactgtagaaatacctgttttaatggtctataaacgaataaaattcataatttttatttacaaagttcgtgttttatgtattaggattttagccggtacagaggggagatgagaattcagaaaatgaacgaaccttcggtgaagctgatatgttgactttctcatgcgaataaaatactttgttattagaacaataaatatacaattatgatatgatatctcgaaatcgagataaaataacctggagggacagcatatgaaagttaacggcattcaccacgtatcggcattaacggccgacgcacaaaaaaacttggatttctataagaaagtattaggattaaagctcgtcaaaaaatccgtcaatcaggatgaaccgacaatgtaccatctgttctacggagatgaagtggcaaacccgggaactgagctgacgtttttcgagattccccgcattgcaccgtttcatgcgggaacaaacagtatttcttctattggattgcgcgttccaggcacagaagccctgcattactggaaagaacgttttgaagagcagcaagtaacgcacagcggcatctccaaaagagccggacgtgacatattggcatttcaagatcatgaggggcagcgacttgtgctgactgctgatgaggaaggaaaaggatatggcctgcctgttaaacagagcggcattccggaagaattttcgtttcgcgggttagggccggttgaactgactgtgccatatgctgaaccaactttacacgtattgacgaatattcttggatttacagaaatcagccgtgaaccagtcgaagggcaaggaaccgccgttattctggaatcaggagaaggcggtgctgcaacggaaatccatttaatagaaagaaacgatcttccgcgagagcgtcaaggcaaagggagtgttcaccacgtcgcatttcgggtaagagatgaagaagaacttgccgggtggcaccggatcatcagccgcgaaggctttagcaattcaggcatagttgagcgctactatttcaaggcgctgtatttcagagaaccgaacggcattttgttcgagttatcaacagacggaccgggctttatggtagatgaaaatcttgatgagcttggccaaacgattgctcttccgccatatctagagcatcgaagagcagaaattgaagcaaaattgaaaccgatccaataaattgtgattcttttgccttccggcgccgccggagggctttttttattaccataattaattttgacctaaacagcatgccttattagggaggaaatatcagatgctgattgggagaaatggcttaaaaccctttgcaaatatgggtgattggtatggaatggcctcggcaaaaatattgtctttgtttattaatagtttattcatatttgcttgttacactatttcaaagttagacaaaaaggagtgaaaaataagtggaaaagaaaaaacgcgagctggatatcgtcctcctcctcattttgctcgcatctgcattcttaaatatctataacatttggaaggacgacacggtgaatccttattacaccgcggcagttacaagtatgatgcaaagctttcataatttcttttatgcttcgttcgatgctgccggctttataacagtagataaaccgcctgttacataccaaatccaaacgatcagcgcactgatattcggtatgcacggctggagcgtcatcctgcctcaggcacttgctggtgtaggttctgtccttcttatgtacttgctgataaagccgacatttggaaaaacggcggcgcgtattgcctcatttgttatggcatgtacgccgatagctgtagctgtagcacgtacaaacaatgttgatgcattactggtatttttcttattgcttgctacatggcttctctttaaagcgatcagaaaaggaaagctgatctggctgttagcagcatttttcgttgttggagtaggttttaatacaaaaatgctgcaggcttacatgattttaccggctttcttattgttctatctgattgcggcaaacgccacaatcaagaaaaaaatcgtttcattggtaagtgcgttagccgtattagcagccgtttcgttatcgtggccgctcattgttgacaatatccctgcaagcaagcggccttatatcggaagcagccaaaccaactctgttttggaattggctttcggctataacggaatccagcggctgacaggccaaaattcaggcggcggccagggtgcgccaaacaaagacgcttcaaaagaaatgtcttcttctgataacactcaagcaccgcctaatcagtcatcaagcaacagctcatcaagcgatggtaaatcctcaaatggcaatatggcggcgcctccatccaatggccaaatgccaagcggcggtcaaggaggccctccaagcggcggagatggcggccaaggcggacccggcggagacggagggaaaggcggtacaggaaccggttcgaaaatgcaatcaggttcagggatgtttggaacgggaacacctggtccactgcggcttttccaacaagagttatctgatcaaatcagctggcttctgccatttgcgatatttggaatcgcaggcttactgatcgctggcgcaagagaaagaagaagattatctgtagagcagaaggaaacggtgttctgggttgcgtggcttgtaccgattgccggattcttcagtgtcgcagaatttttccatcattattatctcatcatgctggcaccgccgattgcggctcttgtcggtgcggggtgggtcgctcttgttcatctgtaccgcaatcagacaggctggaaagcatggcttttgccgggagcaattattgcgacaactggatttgaattgtttattctcagaaactacaacgatcaaatcggtgttggatggagtatcggggtaggtgttatcggcgtgttgtcagcgattgctttgctgctgtttaaacagcgccaaaaaccgttcagttattatgtttcacttgcagctctcctcgcattgctggtgatgccgatgtattgggcaagtacaccgcttctgtacggaggcaacagctcactgcctgaaacaggccctcaactcgcatcaatgagcggaaaaggcatgggaatgtctgatgcgactgtaaatgaaaaactgatcaaatatctagaggagaataactccggagctgaatacctattcgccacaaccgattcgaacacagcggcaccatatatcattaaaacgaaaaaagctgtcatggctattggtggatacagcggttctgacccggcaatcacactgactcaattcaaaaaacttgtaaaagaaggaaaagtgaaatacttcttggcttctggaatgggaagaggcggaaacaatgacattgttgaatgggttgagaaaaatggaaaagaagtagcatcagaaaaatggcaatcaagttctgatcaaaaaacagaaaatactgattcagctgatacatcaagcagcaaggcttcaggtgaaaacggcaaaatgggcggacctggcggaatgaatcagtcagcaacattatacgaactacatgctgatgaataggaggcaaaaacatgagcagacatattcaatattcaattgttgtacctgtgtataatgaagagcttgtcattcatgaaacctatcagcgcttaaaagaggtcatggatcaaacgaaggaaaactacgagctgctttttgtcaacgatggcagcaaagaccgcagtattgagattttaagagagcacagcctgatcgatccgagagtgaaaattattgatttttcaaggaattttggacatcagatcgccattacggcaggtatggattatgcacaggggaatgcaatcgtcgtcattgacgccgatttgcaggaccctcctgaactgattttagaaatgattgaaaagtggaaggaaggctatgaagtcgtgtacgccgtacggactaaacgaaaaggggaaacctttttcaaaaaacaaaccgcggctatgttttaccggcttctcagcggtatgacagatattgatatcccgattgatacgggggattttcgcctcatggacagaaaagtctgtgatgaaatgaagagattaaaagaaaaaaatccatttgtaagagggctagtcagctgggtgggtttcaaacagacagcggtcgagtatgtacgtgatgaaaggctcgccggagaaacaaagtacccgctcaagaaaatgctgaagctgtcaatggacggcatcacgacattttcacataaaccgctgaagctggcaagctatgcggggattttaatgtcaggtactggatttctgtatatgtttatcgtgctgtatctgaagctattcacagacagcacgattaccggctggtcatcacttattgtgatccagctcctgttcagcggcattgtccttctgattttgggcgtgattggcgaatatatcggcagaatctacgatgaagccaaagacaggccgctttacatcgtccaaaaatcgtatggaattgaaaataaaagactctatagagaccagcatatgtcataacctcaaaccccctgtccgtaatggacagggggtttttatgctctgagcacgatctaaagcaaaagatgctgatagatatatggaaattgggtaaagaagagattgtgagcttgtactgcggttcagtcatgctgaaataaaaacagcaaaacttaaagatttcgtcctcggctttgctgcatgtcagctgttatattggggggcttttaagaaacgcatgattagagccgtaccagttatgtttaatagaatactcgtacccaatacaattccccacgtcaacgtcgattcagagagaagaaagctcagcaaaagaaaagccaatcctgcgcagatcatacccagtcccacggttttcatgttcatgcctcctagcaaacgatgtttctagcatctgatgtgaatgatgtcaatctgtatgatatacggatatctcgtcagaaagtttcatagaacaattaggtcttttatctaataaaaagcctcagaccgcttttacggcctgaggcattatgtcttacgaagttttctcttctttttgatccagtttaatttttttcgtcatttctttgccgtttcggagaattttcacttcaacggtatcaccgatctttgcgtctttatataagatattgcgcaattcactgcctgtatcaatttctttaccttttaggccgatgataatatcctccgcttttaatccggccttttcagcaggagagcctgaagcgacctcacggatgtaaacgcctttattcagctggctgccgaacaggccgagtgtgccttcttggtaattttgcggcacttgctctagatcaagcatgctgacaccgatatatggacgttcaatttgtcctttagacagcaattcttcagcaatcggttttacgtcattgcttggaatggcgaatccgataccctcaacatcatcctcactgattttcatactgttaatgccgacaattttgccgtctgtatttaacaaaggaccgccgctgttacctggattaattgctgcgtctgtctgaatgacgttaatgctcgtttcgccggctgatgtagacattgaaaccgttctgtccacgccgcttacaattccttgtgttactgtgcgggacaggtcttttccaagcggatccccaatcgcaataacggtctcgcctgttctaagatcagatgaatcaccgaagtttgccacttttgtgacgtggtcatcactgatttggaggacggctaaatcagttaacgagtcactgcctaccagctttgcagtaacctcagtgccgtcatataaagataccttcagtgatgatgccccttctacgacgtggttatttgtaatgatataagccttgccattctcttttttgaaaatgacacctgaccctgaaccgctttctgtatcttcgctggaatcagaagaactagagccgaacaaagagctgtttgattgtgcctgaagatttgtaataccgacaatcgctggtgaaaggtcttctaccatatctgagattttagaagagtcctcgctcttgaatgcagatgagctgcttgagctttttttagattcagaggaggtgcttgttgctgtaacagattgcgtttgctgctggctggatgattgttttgcagtgtcctgagaatcatggtcaccaagcggtgtaaacgtgtaaatgccaagagcaagactgccgccgatcactccgccaagcaacggtctgaaccatccgaatcctcgttttttcttctcctgatcatgaatgacattgcgggccgagtaggaggcgctctgatcgttctctttcgttaaaaagacctcattctcattacctttcgttctgttttcatcacgatagttatccatcatgttcactccgtttctctattttcacatgtctatttatattgataggtttatgacttgagtttatcataaacaaaaactgtgggataaaaatgaaaagattatgggaaattgtgaaaaagtgcggaaaacggtacacttcatattgtatatgaaaggactgagtcgatggaacagattggattgattggatatggcagcatggcggatatgatcgctagacagctgttgaaacatgaacaaataaaagagaatgagctatttattgagacgagaacgaagggggagcggctgcgggcactcatgtcagattatccaaacgtatcggctgatccgttggagaattgggcaaatacgtgccaattgattttgatatgcgtcccgccactccatgtcatcgaaacaatgcgccgtctgtacccgtatgtgaacagaaatactcacatcgtatccatagctgccggtgtgccgctgcgtcttttggaggcagaaacagaagccggtatctcacgtgttattcctgccattacgtccgaagcagaagccggcatctcacttgtcgttcacagtgaagcactggctgcagagaaaaaagaacgtctgaatgaattgttatcggttttcagccgtgtacgggaaatcaaagaatcgaatttagatgtggccagcaatttaacgagctcggcaccgggattcatagctgcaatctttgaagaactggcactgtctgccgtcagaaacagcagcctgtccaaagaagaagcctttgattttctgattcattcgctatacggaactggcaagatgctgatcgaaaaaaatatgtctttcgaggagacgctggaacgtgttgcaaccaaaggcggaataacgggagagggagctgaggtgatacacgcctctgtgccggacgtttttgatgaggtatttgaaagaaccctgagaaaatatgaactgcttacagaacaggttggtaaacaaacatgaatccttgaaagaggattctttttttatcactgaatgattgagatttttcccagttatattgcatttttcctctttttttaatataatttgttagaatattcataatttagtaaaaaaggaggagcgttatgaaattgtacatgtcagtagatatggaaggtatttcgggtcttccggacgatacctttgtggattccggcaagcggaattatgaacgcggacggcttatcatgactgaagaagcaaactactgtattgctgaagcgtttaacagcgggtgtaccgaggtgctggtcaatgacagtcattcgaagatgaataatctgatggttgaaaagcttcaccctgaagcagacttgatttctggtgacgtcaaaccattttcaatggtggagggactggatgatacgtttagaggcgctttgtttctcggttatcatgcgagagcctcgactcctggtgtcatgtcacacagcatgattttcggcgtccgtcatttttacataaacgatcggcctgtcggtgagcttggattaaatgcatacgttgccggttattatgatgtcccggtattaatggtagccggggatgaccgggcggcgaaggaagcagaagagcttatcccgaacgtgacgacagccgcagtcaaacaaaccatttcaagatccgcagtgaagtgcttgtcgcctgcgaaagccggacggctgttgacagaaaaaaccgcatttgccctgcaaaacaaggacaaagtcaagccgctcacaccgcctgacaggccagttctgagcattgaattcgccaattatggccaagcagaatgggcgaatctgatgccgggaacggaaatcaagacgggaactacaaccgttcaatttcaggcgaaggacatgcttgaagcctatcaggcgatgcttgtcatgactgagcttgcgatgcggacatcattctgctaaaggggtgttttaggctttggcgcgatacatgataaagcgtttttgggcaatggcagctacgattttggtgattaccaccctgacttttgttctcatgaaggtcattcccggatctccttttaacgaggagagaggcacaaatgaagccgttcaaaaaaatctcgaagcctactatcacttagacgatcctctcattttccaatacattttctacttaaaatccatcattacattcgatttcggaccttcaattaaaaaaccgtcggacagcgtaaatgatatgctggaacgcggatttcccgtttcctttgagcttgggatgacagcgattgtcattgctgtgatttctgggctggtgctgggcgtaatcgctgcactccgccgcaatggctttttggactacgccgcgatgagtcttgcagtactcggcatctccatcccgaattttattctggcaacattgctcattcagcaatttgctgtcaatctcaaactatttcccgctgcgacatggacgagcccgattcatatggtgcttccgaccgcagcgcttgctgtagggccaatggcgatcattgccaggctgacacggtcgagcatggtcgaagttctgacacaggattatatccgcacagcaaaagcaaaagggctttctccgttcaaaattatcgtaaaacacgcactcagaaatgcactcatgcccgtcattaccgtcctgggcacactcgtcgccagcatcttaacaggaagctttgtcattgaaaaaatctttgccattccgggaatgggaaaatattttgttgaaagcattaatcagcgggactaccccgtgattatgggaacgaccgttttttacagcgtcattctgattatcatgctgtttttggtcgatttggcctacggtctcttagacccgcgcattaaactgcataagaaagggtgaagcgtgtgaatctccctgtacaaacggatgaacgccagccagaacagcacaatcaggtgcctgatgagtggtttgtcttgaatcaggaaaaaaatcgggaagccgattcggtcaagcggccgagtttgtcatacacgcaggatgcctggaggaggctgaaaaaaaataaattagcgatggccggactctttattcttttatttctttttgtcatggcagttatcgggccctttttatcgccccatagtgtcgtacgccaatcgctgacagaacaaaatcttccgccctcagccgatcattggttcggcaccgatgaactcggccgggatgtgtttacccgaacatggtatggcgcgagaatctcgttgtttgtcggcgtgatggcagcactgattgattttttgatcggtgtcatttacggaggcgttgccggctataaaggcggcaggattgacagcattatgatgcggattatcgaagtgctgtacggactgccgtatctgcttgttgtcattttgctgatggtgctcatgggaccgggactgggcacgattattgtggcgctgactgtgaccgggtgggtcggcatggcgagaattgtaagaggccaggtgcttcagattaaaaattatgaatatgtactcgcctcgaaaacctttggcgcgaaaacctttcgcatcatccggaagaatttgctgccgaatactatgggagcgatcatcgtacaaatgacattaaccgtacctgccgccatattcgcagaatcatttttaagctttctcggcctgggcatacaggctccgtttgcaagttggggcgtgatggcgaatgacggcctgcctacgattttatctgggcattggtggcgcctgttttttccggcctttttcatatctctgacgatgtacgcgtttaatgtgctgggggacggattgcaggatgcgcttgaccctaagctgaggaggtagctgtatggaaaaagttctgtcagtccaaaatctgcacgtgtcttttacgacttacggcgggacggttcaggcggtcagaggggtgagctttgatttgtataaaggagaaacctttgcgatcgtcggcgaatccggctgcggcaaaagcgttacctcccaaagcatcatgggcctgcttccgccttattcggcgaaggtgacagacggcaggattctatttaaaaacaaagacctttgccgtctctctgacaaagaaatgagaggtataaggggagccgacatttctatgatttttcaagacccgatgacggcgttaaaccctacgctgactgtcggcgaccagctgggggaagcgctattgcgccacaaaaaaatgagcaaaaaagcggcacggaaagaggtgctttccatgctgtcattggttggtattccagatcccggagagcgcctaaagcaatatccccaccaattcagcggcggtatgagacagcggattgtcattgcgatggcgctgatttgcgagcctgatatcttaattgcggatgaaccgaccaccgccctggatgtaaccattcaggcacagattttagagctgtttaaagagattcagagaaaaacggatgtgtctgtcattctgattacgcacgatttaggggttgttgcccaggtagctgacagagtcgcagtcatgtatgccgggaaaatggcggaaatcggcacaagaaaagatattttttatcagccgcagcacccatatacaaaaggcctgctgggctctgtcccgcggctggatttaaatggcgctgagctgaccccgattgacggaacgccgccggatttattttcgcctccgccgggctgcccgtttgccgcccgctgtccgaacaggatggttgtgtgtgacagggtgtacccgggccagacgatcagatctgactcgcacaccgtcaactgctggctgcaggatcaacgagcagagcatgcggtgctgtcaggagatgcgaaggattgaacatgaaaagggggaagaggatgaaacgagtgaaaaagctatggggcatgggtcttgcattaggactttcgtttgcgctgatggggtgcacagcaaatgaacaggccggaaaagaaggcagtcatgataaggcaaaaaccagcggagaaaaggtgctgtatgtaaataatgaaaatgaaccgacttcattcgatccgccgatcggctttaataatgtgtcatggcagccgttaaataacatcatggaggggctgacgcgtcttggcaaagatcatgagcccgagccggcaatggcggagaaatggtctgtttcgaaagataataaaacttacacatttacgattcgggaaaatgcgaaatggacaaacggagatcctgtaacagccggagacttcgaatacgcgtggaagcggatgcttgatccgaaaaaaggcgcttcatcggcattcctaggttattttattgaaggcggcgaagcatataacagcgggaaagggaaaaaagacgatgtgaaggtgacggcaaaggatgatcgaacccttgaagttacactggaagcaccgcaaaaatatttcctgagcgttgtgtccaatcccgcgtatttcccggtaaatgaaaaggtcgataaagacaatccaaagtggtttgctgagtcggatacatttgtcggaaacggcccgtttaagctgacggaatggaagcatgatgacagcatcacaatggagaaaagcgacacgtattgggataaggatacagtgaagcttgataaggtgaaatgggcgatggtcagtgacagaaatacagattaccagatgtttcaatcaggggaacttgataccgcttatgtccctgctgagctgagtgatcagctgcttgatcaggataacgtcaatattgttgaccaggcgggtctctatttctatcgatttaatgtcaacatggagccgttccaaaatgaaaacatcagaaaagcctttgcgatggctgtggatcaagaggaaattgtaaagtacgtcacgaaaaataatgaaaaaccggcgcacgcctttgtatcgcctgggtttacgcagcctgacggcaaagatttccgtgaagcaggcggagacctgatcaagcctaacgaaagcaaagcgaagcagctgctcgaaaagggcatgaaggaagaaaactataataagcttcctgcgatcacgcttacttacagcacaaagccggagcataaaaagattgccgaagctattcagcaaaaattgaaaaatagccttggagtcgatgtgaagctggccaatatggaatggaacgtatttttagaggatcaaaaagcgctgaaattccaattctctcaaagctcatttttgcctgattatgcagaccctatcagttttctggaagcctttcaaacgggaaattcgatgaaccgcacaggctgggccaataaagaatacgatcagctgatcaaacaggcgaaaaacgaagccgatgaaaaaacacggttctctcttatgcatcaagctgaagagctgctcatcaatgaagcgccgatcattccggtttatttttataatcaggttcacctgcaaaatgaacaagtaaaaggaattgtccgtcaccctgtcggctatatcgatttaaaatgggcagataaaaactgatggaggcgattgaggaaatactgcttctttatgcgaaggagcggtattttttctctttcttgcacgtatacgtagggtgcagagcaaatgaaaggagtgttttcgttgaattacaagccgaaagcgttgaacaagggtgatacagtcggagtgatcgcgcccgcaagtccgccggatccaaaaaagcttgacaccgcgcttttatttttagaagagctcggtcttcaggtgaagttgggcaaggcgctgaaaaaccagcacggctatttagcgggacaggatgatgagcggctggcggatctccatgagatgttcagagacgatgaggtaaaagcagtgttgtgcgcatgcgggggttttgggacaggacgtatcgccgcgggcattgatttcagcttgatccgcaaacaccctaaaatcttttggggatacagcgatattacgtttttacatactgccattcatcaaaacacaggtcttgtcactttccatggcccgatgctcagcacggatattggccttgacgacgttcacccgctgacaaaagcgtcatataagcagctcttccaggagacggaattcacctatacagaagagctttctccgctgaccgagcttgttcctggaaaagcggaaggcgagcttgtcgggggaaatctgtctttgctgacgtctacactgggcacgccatttgaaattgatacgagaggaaagcttctgtttattgaagatattgacgaggagccttatcaaatcgaccggatgctgaatcagctgaaaatgggggggaagctgacggacgcggcgggaattctagtttgtgattttcacaattgtgtcccggtgaagcgagagaagtctctctcgcttgagcaggtgctggaagactatattatttctgcgggcaggcctgctctgagaggatttaaaatcggccactgctcgccaagtattgccgttccgatcggtgcgaaagctgctatgaatacagcagaaaaaacagccgtaatagaggcgggcgtttcagaaggggcgctgaagacatgaaaatcattcgaatcgaaacaagccgaatcgctgtcccgctgacaaagccgtttaaaaccgcacttcgcactgtgtatacggctgaatcagtcatagtaaggattacttatgacagcggtgcagtcggatggggagaagcacccccgacgttagtgattacaggagacagcatggatagcattgaaagtgccatccaccatgtgttgaagccggcattgcttggaaaaagcctggcgggctatgaggccattctgcacgacatccagcatcttcttacaggaaatatgagcgcgaaggctgctgtagaaatggctctatacgacggctgggcgcagatgtgcgggctgccgctttatcaaatgcttggcggatatcgagatacgctggaaacagattatactgtcagtgtcaactcacctgaagagatggcagctgatgccgagaattatctcaaacaaggctttcaaacgctgaaaataaaggtcggaaaagatgatattgcaacagatatcgcccgtatccaggaaatcagaaaacgtgtcggatcagctgtgaaactgcgtttagacgctaatcaggggtggaggccgaaggaagcggtaactgccattcggaaaatggaggatgcgggcctaggcattgagcttgtcgagcagcctgtccataaagatgatctcgctgggcttaaaaaggtgacagatgcaacagatacgccgattatggctgatgaaagtgtttttacaccgcgccaggcgttcgaagttctgcaaacccggagcgcagacttgatcaatattaaattgatgaaagcgggcggcatcagcggagcagagaaaattaatgccatggcggaggcctgcggggtggagtgtatggtcggcagcatgatcgaaacgaagctgggcattacggccgcggcgcattttgcggcaagcaagagaaacatcacacgctttgattttgacgcgccgctgatgctgaaaacagatgtattcaatggcggcataacatatagcggcagcacgatttcgatgcctggcaaaccgggcctcggaatcatcggggctgcgcttttgaaaggggaaaaagagcaatgatgcacactgtcatatcagcagtggccaacatctggacagcgcctgattcacctcgtccgtctgatcaattcatgcttcaaccgactgtaatgatcagagactggctggagcgcatgacgtatgatgaacggcttggattatgtacagacaatgtaatccaaactcaggttctctttggcgaaaaggtacttgtgacggcggaacagggggaatgggtttctgtgatcgtgcctagccagccatcccgaaaggatccgcgcggatacccgggctggatgaaaaagtaccagctggaaaaaacaaagcccatccatacacaacacgatgtgatgatcagcaaacctgctgcctttttgtacagaagcaatggggaaaaggagatcgaattaagctttttgacagttctgccccttattgcaaaagaaaacggatattttaaggtttcgaccgtttttggggaaaggtttgtgaggcaaagtgatgcagtgcctgtcagccaacagaaagggactgctgaagacatcattcaaacgggtgcgttttttcttggccttccctacctgtggggagggatcagcgggtttgggtttgattgctccggatttatgtacagtatatttaaggcgaatggatacagcatcccccgtgatgcgggagatcaggctaaggcagggaagggtgtcccgcttgatgatatgaaagccggtgatctgctgttttttgcttatgaggaaggaaaaggagcgattcatcacgtcggtctgtatgtaggcggcgggaaaatgcttcattctccaaagacagggaagtcaatcgaaatcctcacattaacagagacaatctatgaaaaagaattatgtgcggtgcgccgctgtttttcagaataaggagggagacaaatgaggcgactgcctttgttagaggtcagccagctgaaaatgcattttgacgcagggaaaaagcggacagtcaaagctgtcgacggggtcacctttcagattcgtgaaggagaaacgttcgggctagtcggggaatcagggtgcgggaaatcaaccttggggagagtgctgatgcgcctttatcagccgacagaaggaagcgtgacataccgcggcacaaatcttcatgcactaagtgaaaaagagcagtttgccttcaaccgcaaactgcagatgatttttcaggacccttatgcttcacttaacccgcgcatgaccgttcgagaaattattttggagccgatggagattcataatctctacaatacccataaagcacggcttctcgtcgtggacgagctgcttgaggcagttgggcttcaccccgattttggcagccgttatccgcatgaattcagcggcgggcaaaggcagagaatcgggattgcgagagcactgtcgctgaatcctgaatttatcgtggcggacgaaccgatttctgcacttgatgtctctgttcaagcgcaggtggtcaacctgctgaagcggcttcaaaaagagaaagggcttacgtttttattcattgcccatgatctttcgatggtgaagcatatcagtgacaggatcggtgttatgtacttaggacacatgatggaaattacagagagcggcaccttgtatcgtgaaccgctccatccctatacaaaggcgcttttgtcctcgattccgattccagatcctgaattggaggacaagcgtgagcgtattctcttgaaaggggagctgccgagcccggtcaatccgccaagcggctgcgtgtttcgtacccgctgtccggaggcgatgcctgaatgtggagaatctcgtccccagcttcaagaaatcgaacccggccgttttgtcgcttgccatttgtatcgaaatgctgaaacgaaggaaaaagtaagataaataaaaagagtggctcctttttactagagccactccatttgtttatacttgatgtaaaaactttacacaaaccgggtaagggacagaaaccgttgatgggaggagtgtcaatcggccggtttctttgtctctttcaaacaagacaaggttgcctgtttcttcatttgaagcaacgaggaacccttccgttgggtcaaatacaaagtcacgaggccagtttccttctgtcgacactctttctacgaaagccagctctcctgaatattgattcacttcaaatacggcgatactgtcatggccgcggtttgcgacataaacaaaacgtccgtcctgcgtgacatgtattgcgcttccctggctgttatctgtaaaatcatcagggatggcagaaacgacttggatttctctaaattcgccggctgtcgggttgtattcaagcgcaatcacttcattgcttaattctgtcatgacataagcgtatttttctttcggatgaaaagcgatatggcgaggtcctgcaccgggagcgaaggaatggcttccggattcagtcaacacaccgtctttaagcttataggtgtagagcttatctatacctaaatcaaccgctaccacataattgtgttcaggtgtgaaccccgcgtagtgtgtatgcggtttttcttgtctttcgtgcggcccttttcctgtgtgagcggcctctgaaacaggtgattgcaagctgccgtcttcctgaaccggaaaaacgtgtaccttcccgctgtgataattggcagtcagtacgaattgattttgatcatcaacgcttacgtggcatggcgaagggccatcaattaactgatgattcagaaatgtcaattcgccgctgtttttatcgatttgataggcagcaactccgccttggccgtctgctttttcgatggaataaaggatggtgttgtttttattcgtcgccacatatgtcgggttgcccagcttagcggccagctttggctcgctgagtgcttttttctcagtatcaagctcaaatgaataaattccttcgcttccgccttttgtatatgttcccacatatcctatgtattttgtcatgcgatttcccccttaaaaatgatgtcacctctatattaacgtatcttgataaaataagctgttcaaaacatgaaaaaggggaagattcttcattcgcctcgaatcagcggcattgtgcagcacctgaaggagccgcctgatttaataatttctgacaggtcaatttcgataatgtgatagcctcttttcgatagctgttgattgacatggcggttgccagggagactgatgatcgttttttttccgattgaaaggacgttggtgccaagcgtaaattgttcgtcctcgggcacctcaataagatcataacgttttgccagcatatcggctgcatctggctcaatggcctgtgaataaattaacgcttcgctttcagatataatgttaaatacgcagtccaaatgcaaaaatttttcatgaagcttcactggaacgatcgtatattcaggaagtgcctcttctagctggccgatagctgaaatgtcggtgcgctggctgattccgacatagacaatgtcatcatcgataatgacgtctccgccttcaatactcgtatcaagcatgcgggtgtaagagataccttggctgtgaaaaaaatcttttataacggcttcttctccttggcgaatcggttcagtcatgcttgacagaaaggctttttctccgatgacaaatcctatgtccctagtaaaaacctgttctgggagtccgtcgcgaacgggcaaaaggacgacctcaacgttgtgtgacctaagtgcctccactaagcggctgtgctggtcgttagcggtttttacatgaatattgtcatcttcaaaatgtttttgtgtttcgtttataacatcttttatggtcatgtgctcaggtttgcataagatcactttttgaagtgtgccgtattccgttcggcataccgttttgtgctgagatttcgggatggatacgtccatttgtttttcctcctaaagtgtgaagaatacatttattattccctcatcatgaaaatcattaaaccattttaaattttagacaaatggaagagaatattgtttaataggagaatataagtgcatttagctaaaagatcagacatcaaaggggagaaaggtatggaaacaccggaaacaagattttgtaaagagtcaaaggttgtgaaaaccagcagggtgttcccgcttgacacgaacaaccataatacgctgtttggcggaaaattaatgagctacatagacgacattgcctctatttcagcggcgcgccattgcagacgtgaaacggtaacagcttcaatggattctgtagattttttaaagccgatcgggcaaaaggattctgtctgcctagagtcatatgtgacatgggtcggcacatcttccatggaagtatttgtgaaagttattaaggagcatttgatgactggcgaacgggaactcgctgccacatcctttttgacatttgtcgcattagattcaaatggcaagccggtgcctgtaccgagggttgtaccggaaacagaagaagaaatcatgctgcataatacagctgtacagcgtgctaatgaacgtaagaaccgcaagagacacagccaggcgcttgcaaatgcgctcggaactgataagccttggtgaacgttaaacccaaaacataagttgttttgggtttttttgtacttttcaatggtgattattacaatggttagtccgtttttgctaggggattctataaaaaagcaacaaatgtcatgttaaattgataattttgtgacaactttattaaagattcattttagatatatcttttattcgtaagatcatgtattttaaagatatattttaaatacatcttttcgaaaggattgtttataaaatgttagataacaaaacaatcgaaattattaaaagcactgtacccgtattgcaacagcatggagaaacaatcactggccgtttttacgatcggatgtttcaagaccatccagagcttttgaacatttttaatcaaacaaaccaaaagaaaaaaacacagcgaactgcactggcaaatgccgttattgcagctgcggcaaacattgaccaattaggaaacatcattccggttgtcaaacaaatcggccacaagcaccgcagtatcggaattaagcctgagcactacccaatcgtcggtaaatatttgctgattgcgattaaagatgtattgggagacgctgcaactcctgacattatgcaggcatgggaaaaagcgtacggagtcattgctgacgcgttcatcggaattgaaaaagacatgtatgaacaggctgaagagcaagccggcggctggaaggagtataagccattcgttatcgcaaaaaaagagcgggaaagcaaagaaattacatccttctatttgaaaccggaagacagcaagccgttacctgaattccaagcagggcaatatatcagcatcaaagtgcggattcctgattctgaatatacgcatatccgccagtacagcctgtctgatatgccgggaaaagactattatcgaatttcagtgaagaaagatggtgtcgtgtcttcctacttacacgatgggctgcaggagggagattcaatagagatcagcgcaccggcaggggactttgttttagatcatgcatcacaaaaagatctcgttttgatcagtgccggagttggcattacaccaatgatcagcatgctgaaaacatctgtttccaaacagcctgaacggcaaattctgttcattcatgcggcgaaaaacagtgaatatcatgcattgcgccatgaagtagaagaagcagcaaaacattctgctgttaaaacagcatttgtgtatcgcgagccgacagaggaagaccgtgcaggtgatctgcattttcatgaaggacagattgatcagcaattcctcaaagaactgattgccaacacagatgcggattactatatttgcggttcaccgtcgtttattacggcaatgcataagcttgtatcagagctcggatcagcgccggagtctatccattacgagctattcggcccgcaattaagtttggcgcagtccgtttgaacacatacatgaaactcttctcctttcagagaagagttttttattgagatataagaaggcagacaagcgccggtttctacatccggacaatcacagacccgctgccatttgtgcatacacggttttgctgttcttgcattgttctcagcaattcattgtttacctcaatcgctctaattagttgcttcattcttagctccaaaccggccagcctgtcgattgtttgctgctggtagccctcgggttggggagccaatggcagatcaaagggccaaagggtattcgacttctgatttttcatattgcgtattgcgcctccaatcggtgtcactttctattatgttatgttcaggcgatatgcacgttcgcctagacactgatgcatagagggcctgccacggggcacaataggctcaatatgaccagcggatggaggtaaagatcggtgttatggatggtatgggtatttttactgaagccagttatcgtattttcgattgcatatattttgtttcggcttgccggtaaaaaagctgtgtcacaaatgaacaattttgacctgcttttgaccttcgcaatcggaaccattatcagtgagccgatccttacatccaagctgccgatgtcaatttattatgcgggtgcttttttggtgctttatcttatcatgagcaagctctctttatctaataaatggcgatggctcctagtcgtgagcccgactgtcctaatccgaaacggggatattgatgaacgcggccttcgtaaagaaaggctgactgttaatgagctgctcggaaagctgagggaaaagggctatgccgacccggctgacattgatcttgctatcattgaagaaacgggagaagtaagcgtcatcccgaaagaggaagcgagagcggtgcaggtgcgggatttgaatatggaagctgaacggaattttatcccgattccgctcatactggatggcgaaatccttgatcataatttgaaatatctccaaaaaaaccgatcctggctgtttgagaagcttgaggaaaaagggtacagccccaaactgctgtcttcgattatccttggcacgatgaatgcacgcggtgatatatcccttgatttaaataccgctaatgaaccgcagcatgatccttacttatataaaccgggaaataacaattaagatggctctctcttgtaatgagagcttttttcttttttaaagggaatttttgtttggtgtcaaatgtacctagttaggaggggaactgaacatgaaggacttatccataagaaacgacatggcgccaacggtcagtttgctgtattccgcagtggaagaaaacagtctccgtctggcttccatcgtaagccatatgacacacagtgaactttactataaggggcgctgccaaacaaaaaacagcacggctcagcttttgcaccatatcacaaatgttgatatcagatgggtctggcgtatcaaggaaaatcggatcccggaccatattgaacaggcatacggcccgatgacagatgaaagcggacggctgcctgaaccggtgaatcagccagacttagatgaactcctgaaaagacatcagcatgtagtagagaagctgaaatcggtatgcttcactttaactgaaaatgctttgaaccagccgctttccttcgaaggtgacaccgcgacgatacgatggggaatttggcatatggcagatcataaccgctatcatcaggcacatattgaagctctcaaaaaagaatggaagcaggatgtggcgaagtatgaacgctaaaacgaagcttgtgactgatcgaattcgtttgcgctgtatggaagatcgggatcaagccactttgtttgggctgctttttaatgatcctgacgtcatgacatattattccggtttaaaagataagaggcaaacccgcgagtgggtcaattggaaccaacgaaatgaaaaagggtacggcgttagtctgtggatcgccgaagataagcggacaggggagtttttggggcaatgcggcatcgttccccagcagatcgaaaatcaaaccgtaatggaaattggctatatgtttgcccgccgccactgggggaacggctatgcgcaagaagcggctcgggcctgtctggactatggctttaacgagcggcagttcggcaaaatggcggctttgattgatccgggtaacaaagcgtccatacgggtagcggagaaaatcggcatgcattacagcaaaacgatcagaaaatggaataaaccgatcgcggtatatgaaagaaaatcttacaattgaaagatagagctgagtttagtatcatgatatcatgtaaagttttctagggttccgcatgtcaattgacatggactggtccgagagaaaacacatacgcgtaaatagaagcgcgtatgcacacggagggaaaaaagcccgggagagtcaatctcatgtgagacgactgtccggggtttttttgttttcggagaatcttaatagatagaaaggaatgactcaaaatgaaatggggattggtcgtgcttgccgctgttttcgaggttgtttgggtgataggcttaaagcacgctgactcagccttaacatggagcggcactgccatcggcatcatattcagcttttaccttctaatgaaggcgactcacagtctgcctgttggtaccgtgtatgccgtctttaccgggctcggcacagcgggaacagtacttagtgaaatcgttctttttcatgaaccggttggatggccgaagctattgttaattggcgtgctcttaatcggtgtaatcgggttgaagcttgtgacacaggatgagacagaggaaaaaggaggcgaggcataatgctgcactggatcagtttattgtgcgcgggctgtttagaaatggccggcgtggcccttatgaatcaatatgcgaaagaaaaaagcgtgaaatgggtgctgttgatcattgttggttttgccgcttcattttccttgctgtcgtacgcaatggaaaccactccgatgggaacggcttacgcggtctggacaggaattggcaccgccggcggggcgcttatcggcatcctcttttacaaggagcagaaagacgccaaacggatcttctttatcgcgttgattttatgctcagcagttggtttaaaaattctgtcataaattgatttttatcaaatcttcagtataatggataaatagtttagacttacaaagataagagggattattcatgaaatcatatatgactcagcggttggacgaataccgtgacggaaatgaggataaaggtcggctcttggtcagctgccccgatcagccgggtatcgtctctgcagtttccgcgtttttatttgaacacggtgccaatattatagaatcaaatcaatatacgacagaccctgaaggcggccggttcttcctgagaatcgaattcgactgcgcaggcattcgtgaaaaaaaatcatcacttcaggcagcgtttgcctctgttgcggaaaaattcgacatgacatggagcttaactttggcgagcgaactgaagcgtgtcgccattttcgtttcaaaggagctccactgcctgcatgagctgatttgggaatggcaaaccggcaacctgatggcggagatcgctgttgtcatcagtaaccatgaggaagcgagagagctggttgagcgcctgaacattccattccactatatgaaagcgaacaaagacatcagagcggaagtcgaaaagaagcagcttgaactgctggagcagtacgatgttgatgtgatcgtgctcgcacgctatatgcagattctaactcctgattttgtttcggctcatccgaatcgcatcatcaatatccaccattcattcctgccagcttttatcggtgcgaatccgtacaaacgggcctacgagcgcggcgtgaaactgatcggtgcgacatctcattatgtgacaaacgatcttgatgaagggccgatcattgaacaggatattgagcgtgtggaccaccgcgataatgcggaagcgctgaaaaacatcggaagaacaattgagcgcagcgtgcttgcccgtgctgtgaaatggcatttggaagaccgtgtcatcgttcatgaaaataaaacaatcgtctttaactagactgcaagaggcccgcgcaatgcgggctatttttgatgacaaaaaaccttgacaagtgtcttttttctttgcataatataaaaaaatcattgagcgttgaagaggattagtaagcagacctttctgtgacagagagcaaaatgaatcgctgaaacattttgccgcatgaaacctgccgaacctgccttggagtcctagggggaaaacctaggcgcataacctggcgttacaggagagcggagcgtgcacaagcgcgttcaatcaaggtggtaccacggaaacccatttcgtccttatgaatcaggatgaaatgggtttttttattgtagaagagccgcggaggagaataaatgaaaaaacaaagaatagtagtgaaaataggaagcagttcgctcacgaatagcaaaggaagcattgatgaggcaaaaatcagagagcatgttcaggcgatttccgtgttaaaaaaagcggggcatgaaatgattctgattacctcgggtgccgtagcggcggggttttccagcctcggttatccatcccgtcccgttaccatcaaaggaaaacaggcggcggccgcggtcggacaaacactgttaatgcagcaatatatgaatcaatttaaacaatactcactgactccgggacaaatccttttaacgagaaatgatttttcgaaaagagaacggtatcgaaacgcgtatgctacgataatggaattattagagcggggcgtcattccgattatcaacgagaacgattctacatctgttgaagaattgacattcggagataatgatatgctttctgcgttagtcagcggattgattcacgcggaccagctcatgattctcactgacattaacggactgtatgatgccaatccaaatgaaaatcctgaggcgaaacgatttgattatttgccagagatcacgcctgaattgcttggatatgcaggttcagctggatcaaaggtcggcaccggcggaatgaaatcaaagctgttagccacacaaaccgcgctgtctctgggagtgaaagtattcattggaactggcagcggagagcaaaaacttgcggacattttggacggcaggggagacggcacttatatcggagacaaagaactatcttcggttaacaacacaaggcagtggattcagttccactcgccgatatcgggagaaattatcattgatgcgggtgccgaagaggcgatgatccataatggaagcagccttttgcccgctggagttgtgggcgtgaacggaagctttccgaaaggggcggttgtggaagtcaggggaccgggcggcgtgatcggcaaaggccaaactcattactcctccgaggagattatggaggctaaaggcaaacgcagtgacgaacttgattttgagaaaacgtttgaggttattcataggaatgactgggtcaatgtaaaagactaggaggcggaaaaatgagtgaagtttctgtaaaagcgaagctggcgaaagaagcagcagccgaaatgatcatgaaaacaacagccgagaaggatgaggcgctcagcctcattgcaaacggactccgcaaagaactggattttctcttggcggagaatgcaaaagacattgtgaacggaaaagagaatggtttaacaccggacatcattgaccgtctctcattggatgagaaacggatacgcgatatcgcggacgcggtggagctcttaatcgacttagcggacccaatcggcgactctcttgaaacgattgaaaaagaaaacggcctgtttattgaaaaaatccgtgtgccgctcggtgtcgtaggaatgatttatgaggcgaggccaaacgtcacagttgatgcggctaccctttgcctgaagacagggaacgcggttgtgctgcggggaagctcctcagccatccacagcaacaaagcgctcgtcagtgtcatttacagagcacttgagcaatcagcgcttccgattcacgctgtgcagctgattgaggatacgagcagagagacagcaaaagagctctttacgttaaatgatggcttagacgtattgattccgcgcggaggcaagaaactgattgatctcgttgtgagagaatcaacagttcctgtattagaaacgggagcaggaaactgccacatattcattgacgaaacagccaaaccgcaaatggcagaaaaggttgttgtaaatgccaaaacgcagcgcccttctgtatgcaacgcgattgaatcattgctgattcacaaggcttgggcaagacagcacggaaaagaattgctggaccagctggaaaacgcgggagttgaaattcgcggtgatgaattggtatgtgaacttcatccttcaagcaaacaagcatcaaaagaagattgggaaaccgaatttttagcgcctgtcctcagcgtaaagacggttgaaaacgtccaagaagctgtaaagcatatccaacaatacggcaccaatcattctgaagcgattttaactgaaaatgacaaaaatgcggtatattttcaaacggctgtcgatgctgccgctgtctatcataacgcgtcaacccgctttaccgacggctttgaattcggctacggagccgaaatcggcatcagcacgcaaaagcttcatgcaagaggaccgatggggcttcctgcactgacttctacaaaatacatcattaaaggaactgggcaaatccgtgaatagcggggtaatgttcaatgaaaaagcttatctcattacgagataagcttttttatacgcgaaaaattgacatttcaaatttaattgtgtacaatttaattgtataaaatatattgggggaatgaaaaatgagtcagccattatttaccgcaactgtttcagcggtaggaggaagagaaggaaaggtcatttcatcagaccgcgttcttgagcttgatgtcgcaatgccggggacaccgagagccaagaaattagaaaaagcgacaaatccagagcagctgtttgcagcaggttatgcagcttgctttgacagcgccctgcagcttgtcgcaagaacagaacgggtaaaagtagagacagaggttacagcaaatgttagcctgttaaaggatgaagcggaccagggctataagctgggtgtgacgctgcaagtaaaaggagaaggagtcagtgcatcagaattggaggcgcttgtgaaaaaagcgcacggcgtctgcccgtactcaaaagcaacctccggaaatattgatgtgacacttgaagttgctgaataaataaaaagaggatgcctgtacaaggcatcctcaatttttttgatgaagtgtttccagtaatgtatatagagcggactttaactgtttgagatcctccccagactgctttgagagccccagaattgtccctggaatgtcaaccgctttttcttttaataacgctccgtcctctgtcaggctgatcaacacggaccgctcatcctcttcagatctttttctcgtaatcaaaccctgttgttccattcgtttaagcatcggagtgagcgttcctgaatctaaatacagctgttcgcccatttttttgacagtaagcgtttcatgttcccataacaaaagcaaagccaaatattgagggtatgttatattcagcttatcaagcagcggcttgtattgctttgtcatctcccgcgaactcgcatatagcaaaaaacaaagctgattctccaatttcatatgatcaaatttattttccattttgttcaccaactcttttttgtcattcgattctattgtatctgaaaaacctcacttttcctattctcggcaaacatagcatgtttaaaaagatcagaaagggaaatataacaactagatacaaataaggaggttgggaaatatggcactatttacagcaaaagtaaccgcgcgaggcggacgagcaggacatattacatcagatgacggtgttcttgattttgatattgtcatgccaaatgccaaaaaagaaggacaaaccggcacaaatccggaacagctctttgcggcagggtatgctgcatgcttcggcggcgcgctcgaacacgtagccaaagagcagaatatcgaaattgattcggagattgaagggcaggtcagcctcatgaaggatgagagcgacggcgggtttaaaatcggtgtcacacttgttgtgaacacgaaagatttagatcgggaaaaggcacaagagcttgtcaacgccgctcatgaattctgtccttactcaaaggcaaccagaggaaatgttgatgtaaaactagaattaaaataatgaccggcatcctgaggattctcaggatgttttttggtgtcggacatgcggggcgggcacagatttatgataaaacttcagagaagcgtttgaagcatgcctttaaaccaaaagttacagatgaagcgggtggctggcacggtgtctgccgtgctgaattgcgcgtatatgctgttttgtatttgcacagggcatagcggctacttggagaaataacaaggaccaggccgcgcatgcctgatccttttaatattctttcttattggcgaagttccgccatgcttgaaacggggataaatgctctgttagtgtcacttgataaaaggggatcgttctttcttcagcaggtttatcaatttctttataaatgaatgaatcatcaaacccggcttcggcagcgtctgtgtgctcagctgcatagaaaacggctttaggccgggcccagtagatggcgcccaagcacattgggcatggttcacagctcgtatacaaaatgcagtcatcaagctggtaggctcctagcaccttacaggctttccgaatagctgtgacttccgcgtgggcagtcggatcattgcttgttgtgacgttgttctgtccctctgcaataatggctccgtctttcacgataacggctccaaaaggcccgccgattcctgcattcactccttcacatgcgagagtgacagcccgttttaagaacgtttcatgattcatcccaatccctcctgtcaatagagtgttattagtatagccgaaaagaatgcaaagaacattcttaaaaaagtgcaaaataaacaaagtatttgggggatttgctaaataagaaaccgattgtggctgtattatagaaaaaaaccatctgccaaatgcagatggttttttcaaattatactagctgtgtctgctgtgctcttgcctgttttgcggcttcaaccatatttttcaatgctgcaaccgtttcttcctgctgtcttgttttcaatccgcagtctggatttacccagaagcggtcagtcggacagacggcaagcgcatcaacgataatattgtacatttcttcagttgacggcacacgagggctgtgaatgtcatatacaccaaggccaagccctttcaaatacgggtggttttttaagtaatctaaaaatcctccgtggcttctgctatgttcgattgtaatcacatcggcatcaagatcattgattgtatcaacgatatcttcgaagttgctgtagcacatatgtgtatgaatttgtgtctcgtttttcacggaagaagtggttaatctgaaagcttctgccgcccaagtcaaatactcatcccaatcgcgggttttcaatggaaggccttcacgcagcgctggttcatcgacttgaatgatttgaatgcctgcgtcttcaagcgctttaacttctttgcgaagggcaagcccgatttggaaggcgatttctttcctcgagatgtcgtttcgagggaaagaccagtttaagattgtaaccgggcccgtcagcattcctttcacatgcttggaagtcaatgactgtgcgtagactgtgtctttcactgtcatcggttcaataaattcaacatctccgtaaatgactggcgggcggacacagcgtgagccgtatgattgaacccaggcatatttagtgaaggcgaaaccggccagcttttcaccgaagtattcgaccatgtctgtccgttcaaattcgccgtgaacaaggacatcaagctccaattcttcctgaatatcaatccatctttttgtttccgcattgataaagttttgatactgttcatcggaccactcagctttccgccatttttggcgtgcgctccgcacttcagcagactgcgggaagctgccgatcgttgtcgtcggcaaaagcggaaggccgagagattcattttgtagggctaaacgttcttcaaacggaatcgggcgcttgaagtctttatcagttaattgctcaagctctttcttttgttcagaattggcgcctgttgcaaactgtttaagcgcctggatatcagccttagcctgctgaatctcttcgctgatcgccgcttttcctgatactaagccttctttcaaagctgtcagctcggccagcttttcttttgcgtaggataatccgttcaataggtctttttccaaatgctcatcagggtgtttcgctactggaacatgcagcaggctgctggaaggctgaatccacagttcatcaacttttgcaatgctgagaatatcaagaacggcatcgagacgctcttcaaggtccgctttccaaatgttgcgtccgtcgataacgccggctgccagcactttatctgtcgggaagccatgtgttttaagctgttccaggtttctgcctttgtcgtgaacgaaatcaaggccaattccctgaaccgggtaagagatcagctcttcataagcatcaacagaatcaaaatacgtctgcaaaagcacattcaaggatgaaagctcacttgtaatgctttcaaataattcttttgcgccgcgtacatcttcactagaggcggtaacgagcgccggctcatcgatttgaacccattttacgccttcttcttcaagctctttcaaaagctgtacatataatggcacaaggcgtttttggatcgcttttgcttcagacggttcatagcctttagcaagcgtaacgaacgtataagggccgacaatcacaggctttgtttccacaccgtattcctgtttgatccggcgataatcttcgagttgtttgtttcttgtcagacggaactcaatgctctcgtcatattccggaacgatgtaatggtaatttgtattaaaccattttgtcatttcactagatacagcgtctttgattccgcgggcgatagcgaagtatgtatcggtagcgtcagtcaaatgtctgaaccgtttcgggatccagttgaagctgactgctgtgtcgagtacatggtcatactgtgtgaaatcagaaacaggcacaacatcaatctgctggtcaatttgtgtttttactgcggataaaaatagttcgtcgatttgcttcaaaaacgtatctttatcagtactgcctttccaatacgcttcaagtgcttttttccattcccggttcagtccgattctcggaaatcctaaattcgatgttttgatggttgtcattgtttctcctcctttatatgtaaaacactctctttcacccgcggatacaggctgctaagaggttttctcacaacaaaaagcctctttcccatgagagaaagaggcttttctacgtaaaacactgcctctctcatctctcagacacaatctgatggaattagcaccgtgccttatgagacatcagtctcggcgcgaaaagcagtgcgccccatttcacaatggtattacggtcggttgctgttggggtcaaaaggccaatccctcgcccaactctcgataagagaaaatgttattaattttttgaaaagttgaatcatttgttggtaatcttaacagtaattcaaattcattgtcaacatagaatttgaaatttttatttacatgatgtggtgtatattatataagaaaaataatcttatagggtcaacaaatgtgattgctctgctttttctgcgagctcatcaggagctgttaaatacaggaatccattgcctgccagcgtttttgcaatatcaagaggaagtgtcctgcggattagctgtgcgaaaacctcagattcagaaagctttctttgaaatgattcttcttcatagcttttgattaaagcaagcgcaccgctgacatgaggggcagccattgaagtgccggtcagcttaccgtacttcttgttgggaagggtggataagatgttttctcctggtgccacaaggtcaatctctttattcgcgttagaaaattctgataattctcgcgctacagaaacagatccaactgcaatcacttcattataagctgcggggtaggaaagctcttctgtgcgttcgtcgccgtcaccttcatttcccgctgcacaaacgacaagcactccgtttttcactgcgtttttcactgcttcttttagctctggcacatcgcttggccctccaagggacattgagatgatgtcgactttctgttccaccgcgtagttgatgccgttaattatccattcgtattgtccgctgccgttctcgccgccaagaaccttcacaatcaataggcttgcctcaggcgcgactccggcaatgcctccgtttgaatcattagctgcaattgttccggcgacgtgtgtgccgtgtccgttgtagtcggaaatcgcatcttccttgccgccgtcgtcatccgtgaagttctttccgccgatgatttgattttttaaatcagggtggcttgtgtcgcagcctgtgtctaatacagcaactttaatatttttgccttttaccccttttgcccacatttctggcgccttaatcactttaatgccctcaggaagctcgtttacatccatgatctgctcattcgtcacatacgggatcaagcggatttcaccattcataaaaaagccctccttttttatgcttgcaagtggattcaagggtgttgcctcatattatatgaaaaaagcaagcgctcggacagagccatttgaagcattttgaaaaaataggatacacaccaaagaattagtaatcttcaaaatattggatggcttcaacatgtatgactgggattcaactgtaagtcaagttataatagtgttggggaaaggagcagtgtcatgaaactgaatgaaaaattatatgcatttttttcagagcatgtggaacaaatggccgaggaatggattgaaacgatggaggaaagtgatccgaattcgctttacgccctacataatgcaacagtaacggaagaattgaaagagcaggacagagaattttaccggcatctgaattacatgtatgttttaccggaaaaacaatttctcgaagagtttcaagagtgggtcattgagctgaccaacgatcaaaaacatctcgacacaccggttcagtatgtcattcgggagtttatgagaaacaggagattatatacgaagtattttgagaagttcgcagaagaaaatgaatcagcgtttgaaccgggagagaagcaaaaatgggcagatttgattgtaaaagtatttgatttcaccatttatacattcgttgatcacgctgaaatgaatgccaagcagcaattaaacgcccaaagagaaatgatattggaattaagctcacctgtcattaccctgagcaaatcaacagctctgctgccgcttgtcggtgacattgataccgaacgggcgaagtttattctggaaaacacgcttcaagcttgtgcgaaaagacgtgtggagcatctgttaatcgatctgtcaggtgttgttgtggtggatacgatggtggcgcaccagatctttaaattgattgaggcgcttaatctgatcggtgtccggtcaaccctgtcaggaatcaggcctgaaattgcgcaaactgctgtacagctggggattgacttttcgaatattactattaaaaccaaccttgcccaagcattaaactatcatcaataaaaaaatccgctatctgtgatagcggattttttatgatgcgaaacataaagatacgagaaaggatcccgcgaataataagaggacgaggcaaaagaacacccagtcgcgccggttcacgctcaatgtcctgtagtatgtccggtttctgcttcctgtaaatcctttcgattccatcgcaagcgctgtccgttccgcttttctgatggcgcttgccaatagcggtatggtatatcgttttaacgcactgattttattaatgatgccgctctccgccgctcctcctctgattttatgagcctgctgaatcagctggacctcatcctttaacagcggaagaaagcgaaagcctgcaatgacaccgtacgcgagctttggtgagagcctgcactgctggacaaggctcagcataaatagaatcggatcggttgtaaaaacaaacatcatcgataaggcggaaaagcataaaatacgaaacccgagagagatgccgacagacacattatcgctgttaatggagatagggcctgcttgaaacaaaaaattatccggtgttgtcggcacttttccaaaaactgcggctgtccacacgcatccgaatgctaaaatcaaaaacggaatcgtaaacaacaaccattttttcaatgggattccggccgccagtaaaacgcccgcaacgatgatgatataaaaacatgccggagtgtaagggttgtaaataaacgacagcatgacgacacaacaaaaaaccgccgccgctttcacagtcggattaatgagatgtaacggttgcttcatcacgcacctcctcttgaaatgccatccattcatatagaaggggaagggtgagctttgctttttgaacaagccctgtttcttgagaaaacaactgcgctggagatccgtcaaaggccaggcctgtatcgtgaagcacaagcacgctgtcagcatacgaagagactagctccatatcgtgtgtaatcataaggacagcagttccctctgccttgatacgttgaatcatttccatgcattcagccgccgtgcgggcatcctggccaaaggttggttcgtctaataataaaacctttacgtcatgcatgagcatagtagctacgctcagtcgccgtttttgcccttggctgatcgcaaacggatgatgatcagccaaatgcgcaagaccaaaacgctgcagcaggtgttgcgcttttttctcagtttcagcatttgctttctggccgaacagaagctcgtcatacaccgtatcggtgacgaattgatgctcagggttttgaaaaacaaatcccatccgtttacgcaattctttttctttatatttctgcagcggctgatcatagagaaggattttgccgctttgcggtttcatgagactggccagaactgataggagcgtcgattttccagttccgttcggaccgacaagcgccgttaaagagccttcgcgcaacgaaaagctgatgtctttgaaaatcgcctgctgtcctctcgcgaacgaaaggctgctgacttcaagcacactctccccagaaggggctttcttctttttgacatgcccggcaggaataggctctttgaacagcatctcttttgataaagtaaacggcatactcagcttttcctgcagatgacagacctttggaatggcgatgcccaatttctttagtgtctccgcttcatgctgaaatagatttttcgtcaggccatccagtgcctttttgcctgatttgtcgagtacgatcgttctctcaatccaaggcgcccattcatcaagctggtgctcaatgacgaggaggctgaaacctttttcccgctgaagatccttcatcagatgaacgaactcccgagctgagaaagggtctaaaagagaggtcggctcatctaaaataataagctcaggctccatcgccaaaatacaggcgagagccactttctgcttttgtcctcctgaaagggttgagatcattttttcttttaaatgggtaatgcgtaatttttctaatacggcgttgattttctctgtcatttcttcttttggaatttgcagattttccagcccgaacgctatttcgtcctccaccgtcagcatgcagaactgctgatcaggatcctgaaaaacgaccccggcatgctgagtaatcgtttcggaggtttcagcatctgtgaccggcttttgaaatagaaatacatgtccggactgaatgccgtcgcaagcctccggatatagaccgtttaaacaaagggcgagcgagcttttaccgcatccgctcggtcctaataataaaacacattctcctttttgaagctcaaacgaaatgtcttgaaaaaccggtttctcgtcttcttcataagagaagctgagctgctcaaccgtcagaagctcatcaaaggcttgcatgttctgacgcccgcttccgtttctttttcagttcctttccgagtgccattccgtttaacacacctgtataagcgagagagtcgctgacagcttttccgagaagccccgccaaaagcgcgccggaaatgaggcggatcacaagcataatgagcagataacctggtgaataggctgcatagccagaaacaaagagatcatagataaagctggctactgaagaccccataccggccagcataaggacagggagagagtatgctttccagcgtgttgcaagaaatacagcctcagccccgagcccttgaacaatgccaatgacgatgaccatcgggccagacggatttcccagcaggcactcaacgagagcggcaatgatttcagaaacgagcgccgcacccggttttcgaatcatgtacgcggcgatcacagaaacgataaaccaaatgccgtaaattggttcataggcgattggcccaaacatacctgcaagtacgtttccgaaatgtgtaaataataaataaacaacggcaaatacgatactgataacggacatgatgacaatttcttttactttccagcttttcatgttatccctgctttctgttttttcttgatggactgttagccgaaagattcacagtcatggtgatgtggtttgtttgctgctcagccatgcggaaaacggcctccaatgtgctgaatacgtcatgcgcatccccgtcaagctcgctcgcgtaatggacaccctgtacgaaagtgccttgggcttttgcaatgtcgacagcctccataatcaatcccatataatccggctcattcattggataaagggcaaattggcacggcgcttccgccttcaagcctcggacagcatcttcattgacacgcttatcacctttggaaagatatgtatccccctgtgtgtcacccgggcatccaatggaaaacgtgccgttcatgacgatgtgttgttcgctgtttgctgcatgaaggtaaatggcttttgcagcatcgaatacatgatcaatcgatccgcgtaacaccgtgctgatatggtcggttttcgtccaaaccttggatgtatctgtttttttcagcgcagacttgatcacactgataaaatcatccgtcatcggatataaagagaagcgaaaaccggcgattctgcttgtaccgcaaatatgctccatttctccgacctcctgtttttttggtaaaataaaaaactgcatatcctaagggaatatgcagtcatagatcgattaagcgcacaaaaaaatacaccattcggtcaacctgcacttccccacgctggtattatccagatcgggtcataagggatcaaagcgcgtttcttccgcgctttatctcagccaaaacagcacccctagtgctttccgtatacaattttttattttgacatcataatagatgataagaatcattttgtaaacaacgaaatcatttttttcatatagggacgggagaggatggtcaaatttggaaaaaggacacatattaattgtggaagatgaagaaaaaatcgccagggttcttcagcttgaattggaatatgaaggatacagcgtcacgatcaaacacaatggcacagaaggtcttgatgcggcagcggaaggcgggtattccttggtgcttcttgatgtcatgcttccggggcttagcggactggaagtgctgcgccgcttgagaaaaacggattcgcagacaccggtcatattattaacggcgcgagacagtattcctgataaggtaacaggtctggacatcggtgcaaatgactatgtcaccaagccgtttgaaatcgaggaattgcttgcgagaatcagggcggcgctgcggcaaaatggaacaaaaactgaagatatcggcacctttcttacatatgacgatttgcgggtgaacgaaaaaacccgtgaagtgagacgcggagacaaagaggtggaattaacgccgcgggaatttgatctgctcgtctatatgctaaagcatccgcagcaagtgctgacacgggagcaaattctaagctcagtatggggatttgattatatcggtgatacaaatgtcgtggacgtctacataagatacatcagaaaaaaactggactatccttacgaaaaacagctgatccatacgattcgcggggtcggctatgccattaaggggtaaacgatgaagctgaagaccaagattcatctatacacttcgatatcactgttgattttattaattttggttcataccgcagtatatctcattttttcgtctgcgctgacatcaaaggatgcggcccggcttgctgatgagacggataacattgccgaagcgctgcgtgccgctgaaacagaaggagtggctttgcaggatatgctgcaggcctatcttccggcaaatggcatggtgcgtgtagtgaatggtgatcaaaaagccgttatgacgatcacaaaagaaaaagcctataaagattttcctctctcttttcatagcggcgaaacggcagatgtgaggaaacctgacggcaagctgtttgccgaggctgctgttccggtgatttggaccgatggacaagtcgtgtctcttcagctggttgaaagactggagaacacagaagagagtctgtttctgctgaaaatcatcttaatcgctgcaagtgctgctgtctgcattgcttctttttttgcaggcagcttgctagcccgccgaatcatcaatccgatcagacgattaatgatcacaatgaaagacatacagcgagacaaagaatttaaaacgatttctttagaaggacagtccaacgatgaattgtatcaaatggggctgacatttaatgaaatggcaatgatgctgaaggagcactatgataaacagcagcaatttgttcaagatgcttcacacgaattgaaaaccccgctcactattatagaaagctacagcagcctgatgaagcggtggggtgcaaaaaagccggaggtgcttgaggagtcgatagaagccattcactcagaagcggtgcatatgaaaaaactgaccaatcagcttttggcgctggccaaaagccatcaaggactcgaggttgatctgaaaacaatcgatctgattaaagcggcgcgcgcggttatgcaaacgctccagtccgtttatcagcgtgacatattgcttgaaacagataaagagagcctgcttgtaaaggcagatgaagaacgcatcaagcagctgttgaccattttgcttgataatgcaataaagtatagtgaaaagcctattgagatgtcagccggaacgaggaatggacggccatttctatcagtgagggatgaaggcatcggaatacctgaggagcatatcccgcatttgttcgaacggttctaccgggcagatgaggcacgaaacagaaaaacaggcggaacaggtttaggcctttccattgccaagcaaatcgctgatgagcatggcattgagctgtctgtcaaaagcaagccgggacaaggaacagctgtcaccatgcaattcagcgaacagaatgggggaggccgatgactaaaacaataaaaacagtatcttttgctgcagcagccattttagttgtcatcatctgtacgtttctcatcattcggcaaacccatgagaacgtattgtcaaaggagactgtcgtaaaaaaagtcgaagcctcttatgaaggcaaggtcacgaaagcaacacaatcaaaggataaaaaaacatatgatataacccttgaaaatccaaagggaacttactttgtaaaagcagacgcaatatcggctgacattctttcaatgaatagagtaaaagcagtgaatccatctgccatgacagaaaaagaagccgagcatctcgcgcttgagcgggtgccgggaacggtcaaaaaacaaacacggcaaagtcaagttgccacttataccatacaaaaagaagacgggaaaacatacgaagtgaaggtagacatgcaggcaaaaacagtcttgtctgccgatcaaatcagcagcaaagatcaacaaaaaacgccgattacgaaaaaagaagccaaaacaattgcagagcgaaaaacgggcggaacagcggatgacgcagatctcgaagaaagtgagggcactctcatctttgaagtagacgttgatcttcctgataataaggaagcgacagtgaaaatcaatgcctacacaggaaaggtagctaacattgtgtatgaagactgacggtttctcatcaaattctcatcttgctctcgttttcctttcatgttgagtatgtaaactgtactcatacaaaacaaaggagggctcacaaatgctcaagaaaaaatggatggtcggtcttttagcagggtgcctagcggccggaggattcagctacaacgcgtttgccacagaaaacaatgaaaacagacaggcttcttctaagacggatgcactcactgaacaagaagcagaagcaattgctaaaacagttgttgacggcacagtagaagacattgacagagacctttacaacggcaaagaagtctatgaagtggagattgaaaaagaaggtgaagactacgacgtttatgtagatattcatacaaaacaagcgcttaatgacccgttaaaggagaaagcagaacaagtcgccataaccaaagaagaagctgaagaaattgctttaaagcaaacaggtggaaccgtaacagaaagtaagcttgacgaagatgacggtgcttacatctatgaaatggaaatccaaacgaagcaaggaactgagacagaatttgaaatttccgcaaaagatggacgcattatcaaacaggagatagatgactaatcaaaacccccgctgcagcgggggtttttcatgataagaaaccttcttttggacaatctaagtagaaaaggaggcgaaacgcatggaaaagaaagaggagcaatacatcaatcaggctgaatatgtccctcatccgacgaaggaaggagagtatgccttatttcttcatgaaacgtatcatttgctttctgaagatgacgagacacaaacaacagaataagggcttaggcccttgttttgttccgtaattgtgatgtaagcgcatttattacttttttgagttgacatagcttgtttttttctgtaatctcagtgtgtcaattcaattaggaacttcgttaggtgaggctcctgtatggagatacgctgctgcccaaaaatgtccaaagacgccaatgggtcaacagaaatcatcgacataaggtgatttttaatgcagctggatgcttgtcctatgccatacagtgctaaagctctacgattgaaggcgcccgcacgctttttttgccgtgcttctttcaccttcaatcccgaaggctttttttatgcctttaaaacgaaaccaatcaaaggaggtgcggagtatggattctccccattcgagtcaatctgaagaagtacccatatactatgacagcaagacaattgattacacgatgaggagacgaactgccgcaccttctggcgaggccggcacgtctccgtagaggaggtacgagtcccgatggttcaaaacatgacctatgacgaactcattttacgcatcattattttactgcgagacgggaaaatcagggattttagaagtgttattgatgagcttcagccctatgacatggcatttatttttaaagaaatgccggaaaaacatcgcgcccgctatttatcttatttaactgtagacgatatcactgatatgatcggggagctggaacgcgaatttcagcttgtcgtcttaaataaagtcggaaaaacaaaagcaacactggcgatgaacaaaatggacaacgatgacctcgctcaattgcttgaagaaatggacgaagaactgaaggaacagcttttatccagcatggaagcgtcagaatcaaaagctgtacagctcttgatgaattacccggctgattcagcgggacgcatgatgacaaaccggtatgtgtggatccctcagcattacacggtaaaagacgcggtcgtcaaactgaaaagcttcgctgaaatagctgaatcgatcaactacttatatgttattaatgaaagcaaacagctggttggggttctttcctaccgcgatttgattctgggtgaacctgaagaaaaggtgcaggatttaatgtttacccgcgtcatatcagcagatgctcttcaggaccaggaagaagttgcccgcctgatagaacgttacgattttttggcaataccggttgtagaagaaaacaacgtgcttgtcggcattgtgacggttgatgatattatcgacgttgttattcgggaagctgatgaggattacgaaaaatttgccgcttccggtaaagacatcacctttgacacaaaagcttacgtggcggcataccggcgtctgccatggctgattttactcttatttatcggactgatttcaggaagcattatcagctattttgaagacgcgctgaagcaggttgtcgcgcttgcgtttttcatgccgatggtgtcagggatgacaggaaatacgggaacacaatctcttgcggttgtcatcagaggtttgtctaaagaagaaatgaacaaaaaaacgattgtgcgcctgatcttccgggagttcagaacaagcatttttatcggagcggtttgttctgtgctgattgcgattgtttctatcatatggcaggggaatgcgcttttgggatttgttgtcgcctcttcactgttcttaaccttaatcatcggcacgatgtcaggaacgattatccctattattttgcacaaactgaaagtagacccggcgattgcttctggaccgctgattacaacgttaaacgatattttatctttattaatctactttggcattgccactgcattcattcactcattataaacgtaaaaagtccgtctcaactgcgagccggacttttattatttaacggtttttgtaccgaaagtgagcattaagctgcccctccagcatttttttccgcacttgcggatcgttttttaacatctgttcttttttgcgcatatcctttaaaatctctgccgtctgtacgccgtcttcacgcttattggcgatatccatcagccgctccacatcggcaaaggagtattttcttgtcccccttgaagaacgctgcgggtaaatgagctttcgttcctcataatacctgatctgtcttacggacaatcctgtcaattcactcacaattccgattgaaatcacttttttgtctttataagaatgatcttctgtggtcatttttccacccctggatgtcttttgataatagtatataaaaaacaaagagaaaaaacctgacgcttgtcatattttctaacatcaaatagaagatttttgaaaaaatacggaagaaaaattaacaagaataatgcgtaacacccaagcgcgttttatcctttatgtaacgaatcaaacgaggaggaaggataatcatggaggaagaaaaagcagtctcactggcaaaagaaattatagagttggatatcaagcgtgatgaaatgctggagacgtttatgcagcttgccggagaacaggcttttcaattattaagatcggttcaaaacggacaataccgaaaatcttcgtaaacataaattctttacattagattcataccacgttcatttaaaaagagtatcttttgtataggatacctcaaaatgaaggaggacgctatgagtaatttattgaaatccgctttagaaaaagaacgacgccattattctgaaaaactctatcagataggggtttataataaagaggtcatgaacaaaatgacgatttctgagcttcggaaagaatacgcttatttctttcgaagcattacaaatcataaaaattatccttatacaagataatgtataaggatttttttgcttttagaaggaatttctcgaattatagcgaatacgtatagtaagggactgaactcttattatatgtaagggttttcattatttttttataaaaatcctatatacgaggtagatatgatgagattatcgtttaacgaagaagaagttgagcgtgcgatgaatttgtacagagtttttgcaagggctttcaaaagtgtgtccgaacatagtatccgtgatagcaaagagcacggttttaatcccactgaatttgctgtactggaactcctgtacacaagaggcccgcaaaaattacagcaaattgggtcgagacttctgcttgtaagcggaaacgtcacatatgttattgacaaactagaaagaaacgggtttttagtaagggagcaggacccgaaagataaacgctctgtttacgcacatttaactgacaagggaaatgagtatttggataaaatttatccgattcatgcactgcgtattgcgagagcgttttcaggtctttcgcctgatgaacaggaccagctgatcgtcctgctcaagaaagcaggcatacacagccagcatttgctgtttcgttaactattctacactctctatttcaggagagtgtttttttgtttccatatgattctttttaaaacatctttaatcttcctatcagacatttcgccaaggtatccattgacgtgttttttatactccttcatctgttcgttcgattgaaaaaatgccgcgatatactcttctgctttctgcatgtcccagtttctcatatctgtgacgagtttcctttcatgtagaaggtttaaattcatttcctcctgtcccggcagtgcatgataaataaataccggaagccgtttctgtaagcattcactgatggtcacgcctccgggtttagtcatgatgcctgtcgcctgttcgtacaaacggttcatctctgctttgctgtgaaggtaaggaatcgcctcaatcaaggggtggtgtaaacttttgacataggagtagagcttttcgtttctgccgcataatattttgtataagatctttccgcctggcgacagttcctgcacccattttaaaatcccaccgacccccatactgccccctgtgatgatgatggtatatggcgggtggtgctgcaaggtatctgctgattccatttcaaaattttggtgaactggaatgccggtcaagtatatgttgttctgatcgataccctctgatattagctgcttctttacttccgtgctcggaacaaaatggtaatcaatgttcttccgtccccataattgattcacgaaaaaatcagtgtatacattcacaaccgtcagattcggatattcaggctttagtcggttcagcagataagaaggcagcgcatgtgtgcagaaggcgatatcaggctgtttttcttggaggatgtgcctcatttgctgtgtgaacagccattcgtacatgaaatagcgtttgtcatgctgaaattctccgcaggcgaggagcctgtaaatgccgctgtacgttttcgggaaatattgaatccattttaaataagccacggaggacaatttttctaaccgcctatacgaatgtgaaaagatatcaatcttttcagctgccagcccttgagactctaattcagcctgcaatgcatcagccacatgatgatggccggtggaaatgcttaaaaaaggaaaaatgagaatgtttttcatgacagtcctcctaaaaaaatatggcaactatattttgaggagaacgttcacaaaatataagggtgtttttgatcataaggaaggtgaaaagatgaaaacttgtttcctttccatatggagagtggttgatccgatttatttctttttttcaaggctaagcttgattgacaacgatcaaaaaagcgtttttcgagtcaggctgacgaagtacaaaggacatcatgtcgtgcttagcgacggaacgcatataagaaaaaatgatgtgctcgttaaaatccacctgcataacataaagctgatcagggagctgcaaagcattgagagcgcagtcagaaagggaatcattatttatcagaaagtatatcaatcgatgccgcttcttcttgactatatcaacaatcataaaaaaagcgagaaaatcaaaggaatcattgggattacaatgcttgacaaaggtgtggaaaggctcggctttgatgtgatcaccccggtgaaccctttttacagatgctttaaaaaagtgtctcatgtgccgattttatatttgacttcaaagcctgtgagcttgcggcatttaccgaattcatcctatttgtttatctcaaaagaaaagctgcagaaaacctatcaaaaaaaagactgatgcctcggtcagcacagtcttttttgattaaatctgatgaaatgtcacttcagggcggcttccgacacggatatttacgccggtttgtcccaagccctcgctgatataaaatggtttatcgtgatgataatgaaggcctttaatcatgttcattcgcacgagctttcccattttcaccaaatgatacggttttggccagtgaatttgcccgccgtgaaaatgccctgacagcaggtaatcataatgaacatctttcatatccagaataatatttgggtcatgtgttaagacaagatgatagccattttccagactttgataagagccggtgatattactccgattcgtactgtaatcatcaatgccgataatattgactggtcctgcagccgtctcgattcgaacatgttcattttgcagcgtgatacagccgttttcctctaaaactcgcttcaatctctgaaagtcctcttctttcaatacataatcgtggttaccgaacaccgcgtacattccatatgcaggctttagcttttgcaaggcgttcaagtaacctgccagtttcggaatattacgtttccgatcaagaaaatccccggtaagagcaatgatgtccacaggctgatcttttgttaaatgatacagctcctcaggtgagactgaaatgttttccaagtgaagatcagataaatgaaggatatttaatttttttctggctggaaggccgtctttttggtcgattgaaatggtgttgactttcacatcttttgtattgcggttcgctttatatagaaatggcacaaatacgagtatggccaatgaaagtaagattgtaaacaaaatatatcccctcccttctatcagtatagtaagtgatcaagccctatggatagcgggaattaatgggtagagacaggttgaaaaacggattgtcatatgatgaatgatttggaagggaaaagggataataaattttgacacatgaggcagaacatgccgacggagtcagaataacaaatggatgtgtaagcaatgttacgattgatgagacaacaaaaaaaagaaacatattatctctggatcgcattatttcttcttttattgtatgtatccccgctttttattttaaaggaagatgcccatatccgggtccacgataatttagattccaacatcgcttggtacaaggttctggccgatagcggagaaatcgtcggcaaggttgacgctgccattccgcaaatcattaacgggctgccccgggatgcctttggcaccgagtggagcggaattgtttggctccatgctttcttttcttccatgaccgcctatgcaataagccagacggttacaagagttgtcgctttttttggaatgtatgtgctgctgaagaaacatataatcccggaaccaaaagcggctttcatccgaattggcgtatcgcttgcatttgccttaacaccgttctggccttcgggaatgctgagtacgcttgggtaccctttggcactgtgggcttttttaaatatccgaaaaggggatatctcatggagagagtggctgacgctgggcttgctccctctatactcaagctttgttctaggcttcttctttttcctggcagggatggcgtgtttttggctgtatgatgccattacaaaaagaagatggaatttgatgttcttaggcagtattgcatttatgacgagtatctatcttttcgttgaatatcggcttgtctattcgatgctgtttgagcacgcaccgatgcatcgtatcgaatttatctcatctaggcatgacgtttggcattctcttcgactatccataaaaaactttgtctatggccataatcatgtgatgaccgttcataccgttgtcatccttccgatcctgatggtcgtatttgctgctctgctgttcaaacgaaatcggacaaagccagaaaatgtttatctgtttttatgtgtgcttaattacgggttgtcattatggtatgcgttttggttcaacaaaatttgggctgttccaaagcagaaatttgcttttttagcagaatttaattttgcccgttttcattttcttcggccgcttgttatatacgtgagctttgcgcttgctttatatctcatttggcggatggggaaaggatggaaatggcttgtgtacgccgcagtcgctgcacagctgatggtgttggcgccttttaatgaagaatatacgtatggtgttcattacaacgcgccgacattcagggagttttatgcatcagagcaattcaaagagattaaggaatatatcggacgtccgcaagattcgtatagggtggcgagcatcggactgcatccgtctatcgcccaatataacgggttttatacgttagatacgtataacaatctgtatccgctctcatataaatatgaatttagaaaaatcatcgaaaaagagctggaaaaaaattctcggctgaaacaatactttgatgaatggggcagccgctgctacctttttgtcgatgaactcggtaaacgatatgatttcaaaaagaactcgaagaaaacgatcaacaaccttcaattaaatacagatgtatttaaaaaaatgggtggacggtacattttttcttcagttccgatcatgaatgctgaacaaaaccatctcgcgctcgtaaagacgtttgaccataaagattccgcctggcgcatttatttatatgaaacaagataaggaggatatcgattgaaacagtcacagccagtattaaccatcgtcgtcccgtgtttcaatgaagaggaagtgtttcaagaaacaagccatcagctgacagaggttgtagatgatttaattgaagaaaaattaattgctgaagacagtaaaattctgtttgtcgatgatggcagcaaagaccgcacttgggctttgattgctatggagagcataagaaacaagaaggttaccggcttaaaattagcctgcaatgtcggccaccaaaaagcgcttttagccggattgcataaagcgaagaataggtcagactgcgtcatttcgatcgatgctgatcttcaggacgacatctctgtgatccgggattttatgctgaaatatcatgagggctgcgagatcgtttacggtgtacgccggagcagaaaaaccgatacctttttcaagcgcacgaccgcgttagggttttatcgtctcatgaataaacttgggattaaattaatttataatcatgctgattttcgtttaatgaataaaaggtcccttgaagagcttgagcgttatccggaagcgaatctgtttttaagaggtattgtccccatgatcggctttaaatcggccgaagttttgtatgaccgcaaggaacgctttgccggcaaaacgaaatatccgctgaaaaagatgctatccttcgcttttaacgggattacttcattcagtgtcgcaccaattcgattctttacgcttttagggtttgttttgtttttcctcagcgctgtggcagggattggcgcgtttattcaaaagctgctcggccatacgaatgcaggctgggcgtctcttatcatatccatttggtttttgggcgggctgcaattgatgggaattggaatcatcggagagtatattggaacgattttttctgaagtgaaaagacggccgaaatacgcgattgatattgatttgtataatgaacagctgagcccgcttcagcgccaggaaaaagagcggttagaaaaaaagtacagttaaacacggaaagagctgacttcattagtcagctctttttcttcaactgatgcaatatagcgctaagcggttcgtcttgcgggttgcggtaaaaatcaaaaaatgggcagccctgcttcttaattcgatcgatgaccgtatcaattgtaaacagagcgggtgttaaagatgattgcacctcatgccagtagagcggggctgcaacagtcccaagctcatttcctctcgttgaatagggacagataatcgtttttccttctgcatgctgcaaataatcaagatacaatttgcagtgtctgtttttaatcaagcgttcagtggtaaagagctcgggaaatgcattggtgcagtactctgcgatcagctgcgtaaattggcgtgtttcttcatacgtaaatgcctcgggagacaagggaatataaagctggatgcctttgttgccggacagcttcgggtacgatgtgatgccaaaggaatccaacagccgcttcagttcatttgcggcctgcacggccataagaaagtcatctcgcgaaggcgggtctaaatcaatgacaatctcagccggacgcctgcttttaatggtttgaaaaggaacgtgaaactccaaagcaagctggttgcaaagccatagcaatgtagacatatcctcacagacaatatgttcatggcttccatcatagaaagactgaacaaaatccggcgcatagtccggcttgtttttttggaaaaatgattcgctcctagatccatgcggatagcggatgacggtgacagcccggtttttcagaaatgggagcaggtagtcactgacttcaatcatatactgaataaaatcttcttttgtttttttattcttttcaaatatgattttatccaggcttgtgaactggagctttgggtgaaccggtttggagtgtcgtatgacttgcgcatacgtgcattcggtccagtccatttggaattcgaaaccgataaacgatacctctcttaatgtgccttggagaattgttaagtattgaacagctgcacaaatcgaaggttcaagcgtaaattcgcctgagggtgtttgatgtccgtgctgttccataatctcgcgtatagcgcttttttcctcatcacgcattccgtgcgagacagaggcaatcggtgtcattattccgttttttaacaccgataccgtcagaaacccgttgttagggttgaaccctgttatgcaaacataagcttgtttaaagtttttatatttgagccaatcggacgaccgcttcttttcaagccatttgctgtttgttttcttcgctacaattccttctccgtcatattttattaccatctcccagagttgatcaaaatgatcataacagggaatggattgaatggtttcttttgcgtaaggatctggagatgcaggaagctttgctgcggatatgagttcacgcagcgattttttgcggtccaaatacgaaagaagcgttacatcttctccgcttcgctctaacaaatcaaaggcgagaaagcagcacggccgcgcgtttgccgattcctgaatcttgtctggccttttcaaacgcccccgcacttgaaggtgttcaaaatctgcacgacagggattcaccaaacatacgatttcaccgtcaagtgtcagcggaagctctttttctaggtgctgaaaggcagttttggcgaattgtgtgatttcagggaaggtgctgctgagctccacaccatttctgctggttaaggtcacacctgaagaatggatgcggagaatacagcggtacccatcatattttacttcgtaacgccattctgctccgattggcggtgacgaagttaagaccggctgcatggtaaacgccatgcgctatgatgtgccggaggctttttttctagttgttttttgttttttatctccggctcctttcggttcagcggcttgtgcaggtgcggcagccggtgtctcccggttcggccttctggttctgtcgatgctggcttgcagagcgcttaccaggtcaatgacatcttcacgaggtggcgctttatcaggagtgacagccgtttctttattttctagcttgtcgttgactctttgcagcagcgcctgtcggtacgtgtcttcatatttctcaggctcaaacttagcagtcagttcatctattaatgtgatagcagtttgcagttccttatcgtttacattcgattgatcaggtacacctgggacttgagcggcgcttctgacctcatcgggataatggatagactccatgacgatacaattttcataaacgcggagaatcgccagctgctgctttgacctgattgtcatattggcgataccgatctttccggttgagcgcagcgcctcacgcagcagggtataggccttcgtcccattatccccggggccgacaaagtaggagcggttaaaataaatcggatcaatttcctgaagctgaacaaagtcaacaatctcaactgctttctcctcatgctcctgttttaagctttttaaatcttcgtctgtcagcactacatattttccttttacatattcatatcccttcacaatttcatcaggactaagagttttttcgcaatttgtgcaaactttctcgtatttgattggtgcgtgatcctctttatggaggctgcgcagtttaatatctttatcttctgtggccgcatatagcttgatggggatgtttactaatccgaagctgatcgatcccttccacattgtatgcatatcgataaacccctttttttctttagtgtgaagagaaggagtacgattcatgtgtagtaacttatgggtgaaaaaaagccggcgctgttattgcgacggctgttcaataatgaattgttcgaattgttccggaggtattggcctgctgaaaaagaagccctgcaaatggtcgcagcctttttcaaaaagaagctgcttttgagctgcattttccacaccttcggcaatcacctgcaaagacagctgatgccccatggcaataatagctccggtaatttgctctgatttaggatgggtctgaatatcgtcaataaatgatttgtcaatcttcagcctgtgaatcgggaagtccttcaaatagctaagagagctgtgaccagtaccgaaatcgtcaatactgattctgattcctaattctgttagggatgacaaaacctttttggagtgattgagattgtccattgtcatgctttccgtcacctccacttcaagaagctgcggaggaagctggtacttattaagcgtatccttgatgaggggaatcagatctttagattgaaactgtctggcggaaatattaatggcgacagaaagatcatagcctttgtcatgccaaatccttgcctgcttgcatgcttcatctataatccactttccgatatcaataataagtcccgtttcttctgcaacaccgatgaattctccgggcggacgcagttgcccgtctggtgtcacaaggcgtatcagtgcttctgctcctgtcattttttgttttttcacactgaattgcggctgataatgcaagacaaatctatcgttttcgattgcttctctgagtaccatctcttggttaagcttaacggtttctttgttgccgattgaaaaagaatagtatctgtatttgcttttgtttcgttctttagccgcatacatcgccatatcagcctttttcatcaattcaaggccatccgtcccgtcttttggagatatcgcaatcccgatactgacagatgtgacaagggtgtgatcttgaattttgaaaggttttttgaatttttggataatttttcttgctaaaacatctgcttcgcctgttcctgtattggcgtctgttaatataataataaattcatcaccgccaagacgggcgataaatccgttatcagggactacagatgacaggcgtttagctgcaaactgaagcaattgatcaccgacattatgccctaatgcatcgttaatcactttaaaccggtttaagtcaagaaagaatacaacagtgttataatgcaaggaatgctcgcgattcagcacctttgttagatgagagatggcatgccttctgttaggtaagtctgtaagcgaatcataatgagccattctatggatttctttttctgctttgtactgcttcgtcatgtctttacaaatgacataaatgctgtctagttcctgattgacctcaacaggtataagcgtaatatttaagtgaaactggcctttttcagtgataagatcgctatcgctgttcatcgcttgtttatcttttttaacttgctcaaaaaggcgcttaaccttcagtgatgtgtaattcctccagtcatgcatgctgaagccaaatttgctgatcatttcctcaccagcgtgattggaagatattatgtctccttctaatgataaaataaaaattgcatcaatattgtggacgattaaagactgaaatcgctgttcgttatcctttatgcgttcgctctgtttaataaactttcgatctgcatgggaactgaataacaataacgtttggatacaaaaaataattaaagtaacaaaaattgaccaatgaaacgtttgcacctccatatggcttccgggcggagccatgtccttatggaaagttgccgcaagcatccctgtgtagtgcatgcccgaaatcccaatgcccattacaattgaactgacgcctttatagaatataagatgctcagaatgtttttttacggccaagtcaaagaatatttttaacgagacgaaagaggctgcaatcgcaatgataattgaaactgtaaataaaataggttcgtaaataatcattacccgggaaatggcagacattccgatatagtgcatagaagcaatagatgcgccaagcacaactgatccggtaagcagtctgtaatatgtaagaatgtgccggctgacaaaatataatgacacaaatgatcccgaaacagatgcgccaatggctgccattaaaggcatgaattcatattccatcggcatttccatatggacggccatcatccctacaaaatgcattgaccaaataccgaatcccataataagtgagccgccgatcagccaaattttactttttaagcctgtattgatggtgactttccttgaaagttcaagggaaatatacgaggcggtacaggcaattagaatagataaacatatgagagtcgtattatatgtaacgtgtatttccaaatggagattccccccgtatcgtgtgttccagtcttgttgactctctttattatcggctgcttaaccgcagagtttcagccttcaaaacgatagaaatacgagggagatctatttttagttcaactgaccgtgaaaaatgtgttaaaatcatcttgatgttttccgaaaagagaaaaatgtatgatacataaacatgaaacaagggagttggtggctatcgaagagctggttatgtcatggattgaagcatttaaaagcttatcttattttggaatatttctagcgctcagcattgagtttattccggccgaagtcgtcttgccgcttgcgggctattgggtatctaaaggcgatatgacacttgctggcgttgttttggcaggatcgcttggaggagtggccggtccgcttacgctgtattggataggccggtacggaggaaggccgtttcttgaacgttttgggaagtatctctttattaaacctgaagcgcttgataagtcagataattttttcaaaaaacatgggggctttgtcgccttcagcggccgtttcttgcctggtatcaggacattgatttccataccgtgcggaattgcaaaaatgaatgtttgggtgttttcgctttatacattcattgctatgcttccgattacatttgtatatgtttatctcggtgtgaagctcggtgaaaattggaaggcagtcggctctattcttgatcaatatatgcttccgatcgggatagcgattttggcgctgttcctgctctacttactgatgaaaaagaggaagaaacgcacgcactccgaacaattatctgtatttttgaaaaataaacgttgacaaatcactgcgctgcgcatattattgacgtataaaatcatatttcttgaaatcccaaaggggagtagcgtccggaatgtattccggaaacaaagtcgtcatttcatggattgtatccatcggctttgttggcatgcctgaattcatgtctagcaagacctttgccttatgtcggcaaaggtcttttttgcatggtccggccggcataagatcggatgaagagaaagaaaacaacttttttgggagggtatcatttatggatgcagcattattattagagtatggttgggttcttctcgtcttgatcgggctggaagggattttagccgccgataacgcgctggttatggcggtaatggtaaaacatttgccggaggaaaaaagaaaaaaagcgttattttatggattggcaggggcttttgttctgcgatttggctctttatttgcaatttctttcttggtcaacgtatggcaggttcaagcgattggcgcgatctatttgctgtatatctcagcaagccacttattgaaaagatatgtatttaagaaagaagacacacataaagagacgaagcaaagcggtttttggccgactgttttaaaagttgaactggcagatatcgcgtttgctgttgattccatcttagcagcagtagcgctggcggttacacttcctgggacatcactcccgaagatcggcggacttgacggaggacaatttctcgtcattttggccggcggtatcatcggactggtgatcatgcggtttgcggcttccatgtttgtgaagttattaaaggaacgtccaagcctagaaacagcagcctttgtgattgtcggctgggtcggagtgaagcttgctttatatacgcttgcccatcgcgacatagcggttgtttctgagcactttatccattctggaacatggaagctgatattctggggtgtcttagcagcaatcgcggtttgcggctggtttatgtcaggtgggaaaaaacagccggagggtgcacaaaacgaacaaaaaaacagcacccgtgaacgggcgtaatctgaaagactctgcttaaaagcagagtctttttgtgtttgaagcgttttcataagcgaaataaaataacatttttataacatctttgttacaaaaaacacgcataaaacccccttaattctttagaaaggcacgaaatcatgtatagaacgtcagaatggtttgtcataattgagacattggaaatcaatatttctttttctcctttgcgaatccctatcaaattagctatcattaatgagtagttatagggaggaactgaggtgaaaccagtgcttagccttttgtttaaattgggaaaaaagaagcaaacacttgaaaaagctgttgagagtatacaaaaaggcaataaagatctgcaaaatgaattaatacagcaatataagccatttatcgcaaagacggtttcatccgtttgtaaacgatatatagatgaaaaagacgatgagttcagtattggactgatcgcgtttaatgaagctatagaaaaatattcacctgaaaaaggaaattctctgctcgcatttgctgagcttattataaaaagaaaagtcattgattacattagaaaagaagccagaagcgcacaaaatataaatatcgatttacaggaaggagacgatcaggagtcatcacaaagcctgattgaagccgagctttccattgatgaataccgccgtcagattgaacaggagcagaggcgggaggaaatcctctattttcaaaagcagctcaaggattatggtttatcgtttaaagaactgcttgaaaattctccaaaacacacggatgcaaggcaaaacgccataaaggtggcaatgacgcttgttgaacatgaagaattggccgctatcctgtatacaaagaagcagcttccggtcaaacagcttgaacagcttgtctctgtaagccgaaaaacgattgagagaaacagaaaatatattattgcgatgtgtattatcattacgggtgattatatttatttaaaagattatcttaaaggggtgctgcactcatgagaagagggattatagtagagaaaaataaaaaattcgtcacgttgctgacccctgacggacaatttttaaaagccaaaaatgatcgacacagctatgaaatcggagaagaaatcatgcttccgagtgaaacacgcatgggcagaagggccagcttttttgatttttttaaactgcgccctttcaaaatggggatttttacgatgactgctattatgctctttatttttatagttctccccgttttttctaataataaggcctatgcgtatatgacaatcgatatcaatccaagcgtcgaaatggcgttaaacagcgattatgaagtgattgaactgacgcctctaaacgatgagggacagaaagtcgtgaatgatatagatgattgggagaagactgattttaaaaaggtgattgacgatattataaccgactgcagtgaacacgggtatgtaaaaaaatcgaaagaaatattgatttccactgtttatgaaaacacagaagacaatacatataaaaaggctgtgaaaaaacagctgaatgatgtgactgaaaaatataaaacgacataccgcatggaatctctcgagtcagatatgcaaacgagggaaaaagcgaagaaagaaggcgtctcaacaggcagctacatcaaatcaaatgaaaagaatgacaataaagatataaaagatgactccagcaaaccatccggggaagaggatcaaaagagtgatgaaaatgaggatgaaaacaccgatcaaactgacacccaggacagcaagcaaggagataatgaacagctgaatgatgcggattccggagaccagaaagaagagaaagcggatgaccagattgatgatagtgacaaagataaaaaaataaaggaatcagatgaaaacacaaataccgaaaaagatggggaccatgagcaaaccccaatacaagatcctcaagataaaggaaatgaaaataacggcgctgacaagggccaaagccaatatcacagggactggaacaatggtgaacaaggcaagaaccgttcttcgtccagaagggataacgcttcagaccgacgtaatccaaacggctacagcagtgataatcattcagctaaaaatgaagattcgccgagtgcccccggcgaataaagacctgaatttatttagttgtgccatttaattgtgattgtgcttgctgtaccagccgctttgtcatttctccgcctacagagccgttagcgcgtgcgactgtatcagaaccaaggttcacaccgaattcttgagccacttcgagtttaaattggtctagtgcctgctccacccctggaacaacgagtttatttctgctcgccatctttttcatctcctttttcgataaagaaattcttaacgcgtatttagtttgaaatatacggggtttatttatgctggcaattgttgtggagaaaaataaaaccccggcctctgagccggggtggcgcagactatagaatgtctgctgtcattttatgtgcggttgcctgaatatggaatgtcaaaatggagaggactgtaatggcgataatctgtctgattttaagccattggctgtcattcagttcttcaaaacggtgacggagacgctctgtctcctgttcggcgatctcctgcagatttgattctttcatagaaggagtatcttggtgatggatggcatcaagcacatatgcgcagctttcataataagcaatcgggctgatgacatcatcagatctgtctgagattgtgttaaaggccacttttaaaatagcccgtatgtgttcaaagtcataaatggattttaaatcacgtacaattaaaagaataactgcctgttcaattgagtattttttgcccagctcagggtgtccgatcagatctttgatatcacgctttacccagttttgaatcgcggttgactttaacgaagtcagctcgcataagttgccaagctctacgatttcatttgtagacagaccgtattcttttttctgtttttttcgttcgtatcttgtaagaaattcaggaatttctagatgattggctgctttttctgctgacatgttcgctgattggacgagaatgtcgagcgggctatgttctccttgtccttttagggaatagagcagccgcaccatatcggttcgagagagtttaaaaatgttcattgttcacctctttaaacaatttgacgcggatataggtctatgtataagttcaaaattcaagcgtcagcaaattacattaacatcatacgtcgaattccttgcattttcaaatggatgttttataatttaaatatacgggttcttttgaacttaaaataacggaggttgttatggcgaaaagaatttttctgtttattctaacgaatattttggtgcttacaacaatcgggatcgttttgtctgttttaagctctgttacaggagtcgggacgtactttacagctgatggcggtatcgatccaatggcgcttcttgtgttcagtttagtcgttggatttgtcggttcctttacgtctcttgcgatatccagatggatggcaaagacgatgatgggcgtcagagtgctgaatccgaaaaaacactcgctcagctatgaggaacagcaattggttgatcgtgttcacagattaagccgctctgccggtttaacgaaaatgccggaagtcgggatttaccgttcacctgaagtaaacgcgtttgcgactggaccgtcaaaacgccgttcacttgtcgcagtatcgtcagggctgctggagcagatggatgacgcagcagttgaaggtgtgcttgcccacgaggtcgcgcatatcacaaatggtgatatggtaacaatgacgcttttacaaggtatcgttaatacctttgtcgtctttttatcgcgtatcgccgcttggatagcaagccgttttgtcaaagaagatctagcgccgatcgttcattttattgcaatgattatttttcagattgtcttttcgatacttggcagcctggttgtgtttgcgtattcacgccatcgtgaattccatgctgacaggggaggagcggatcttgccggcaaggacaagatgattcatgcgctgcggacgcttaaaagctattcttcccggattttggaagacgatcagacagctgtccaaacgttaaagattaatggcaagaagcgctcttcacttttctctactcatcctgatttagatgagcgaatcagacggctggaagctaaataatacaaacacattgttcctctgagagaattctcagaggttttttattttatccattgactaaaatcataaaaaaataagcaagttaagaaaatgtttcgtaaaagcctttaaaaatggacctaatatctttagaataattaccgtacttaaaaagagaggcagaaggattttacatgagattaaagtttggaaaattgatacaggccttgtcaccggcccagctgatcgcattatattattttcttgcagttactgtggccgttatattgctgagtttgccggcggcccataaaccgggggcggattggacgtttattgatgcgctttttacagctgtcagttcagtcagtgtaacggggctgacagttgttgatacagctgatacattcagcacaatagggatttttatattagcatttgttctgcaatttggcggaatcggaattatgacgctcggaacgttcatttggctgatcatgggaaaacgaatcgggctgaaagaacggaagctgattatggttgatcaaaaccaatcccagttttcaggaattgtcaatctgatgaagcaggtactgtttctgatcttgtggattgaattttttggcgggctgatactcggcacatatttcttaacctactatgactcctatcaggaagcctatttacacggattttttgccagtatcagtgcaacgacaaacggcggatttgatattaccggtaattcgatgattccatttcgccacgattactttgtgcagtttattacaatgcttttaattatatttggagcgattggatttcccgtgcttgttgaagtaaaggatttcctgttttcaaagcatcggcgttatccatttacgctttttacaaagatcacgacgattacgttcggctcacttgtcttgtttggagccattggcatctttgccctggaagcaaaccatgcgttcgcaggaaaatcatggcatgatattttgtttttgtccctgtttcaatcaacggcaacccgaagcggggggctggcaacaatcgatatcagccaattatcagattccacactcttttttatttgtgcgctgatgtttattggagcgtcgccaagctcagtcgggggaggcataaggacaacgacttttgctttgaaccttcttgcgctgtttcattttgcccgcggcaataaggccgtaaaggtattcaaacgggagcttcaccctgctgacttgatgaagtcgcttgttgtcacgatgatggcgatcctgctcgtttttggcgcgacactcattctgaccattacagaaaaacattccctgctggagcttttgtttgaagtgtgctcggcattcggtacaaccggcctatcgcttggaattacggcagatttgagcagtgttggaaaatgcgtcattatgattgtcatgtttatcgggcgaatcggcatcttgaccttcctgtatctgatcggaagaaaggaaattgaagcgaattatcactatccgaaggaaagagtgattatcggataggcaaaacaccgcatattttgcggtgttttttgattaccaaaaaaaagatgtgtgcctcctgttcagttggagaacctaactccgacaggtgcaatttacgctcctgcatcttaaaatgtctgaaaattggcgaggaggattcgtatgaagcgtaaagctgaagtgaatgaagccattaaaaataacaatacacctaccgagagcatggaccccaattcatataagacacaatatcatgacgaccccaattttagaggggcaaaccgcaattccaaacagggccagcagggaggcatgtaattgtgaagaaaaaccgtcatagcagagacatgcaaaatcataaaaagcctatgaataaaaaggtgctggaggaagaattctcaagtgaactcggggattacaatgccggaaagatcatcgaaacgctggaagtcaccaagcctgaaaagaaaaaagaaaaaaacaaaaaacaacaataaaaaagacctcttaggcggcgtcccgcttaagaggtgctttttctattttaaataagcatttttgcccgttcctctgacaaattgcaataagcttgtcatcctcagctcaatgaatggctgagcgactgtcttaacaaagttgctggagaggactgatgtcagggctgctgttaaaagcaagaggatcactaagctttgatagtcagtaagccaatcctcaagcccgacctgccgtaatgtcttaataataaacccgtgaagcagatacacgtaaaatgtccgggttccccatttggtaaagaaataccgtttttgcggaacgagcgctaaaaagctgaaggttgccccaaaggcgagtacataccagccgattcgggatagtccgcttaccagggtaacgtctccaaatgaagaatacggttttgaaccaaacagaaaagaatagtcaaaatcgatgccccagcagatgacgaatactgcggcaagcactccgagcgcaatttgtttgccgcgttttgatctcaataaatcaaaatgatgtttatttaaataaaaaccgacaaggaacatcggtaagaatacgaatgtccgtgacaagctcagcgtgctgctgacaaagtccagataaccgatcagcacggcgattccgcagctgacaaacagcgcccactgctttgaaagctttgaaaaaggatataggagcaggttccaaaagaataagcttacaagaaaccataacgaccattgcggatcaatcgggttcacatttgccatgctttcatcttgcataatgtaataaaagacggaataaataatttggaaaatcaaatacggaataatcagcttgaccgccagcttttttacatatcccgcccgtttaaagcctttcgcgaaataaccggatacaagaataaatgcaggcatatggaatgtgtaaatgaacttgtagaggtagagcataaaatgattatcattaataaaggaacgaaggatatgaccgaatacaacaaggaatatcaataaaaattttgcgttatcgaaataactgtcccgcgatttactcatagcatcaccttctctttcatcagtcactaagagattattccctgctggtacatattttaaaataaaagatgaaaaaggaatctaaaaaaatgctgattgttaggtcgatgtaaagtgacggtaaggatcgtagaaaatgtcttcgtaatgtaatgacgctgaaattttctgaaatttatagggcaaatgaaggaagttcccgcattttgtagaaatattgagggataggttttgaagaaggagtgtacatgcatggaaactcttggtgtccagacaaactcggagctgcgagaggaactgaatcgcctcaaagaagaaaacgcgcgactgaaaaaggaattgaatcagcatcaagtgattgtcaacaatacgctcgatgctatttttatttgtgataacgaaatgcggattgttcaggcaaatgaagcaacagaaaggatgcttcaagttgactcggaagatttgaaaaagcgttctgttttggattttttgttttcaatcccaaaggatgaactgaatctttccgtaaagaagttttttaaaaaaggctttctgtggaaggaggttccgatcaggcttgattgcggggcaacaaaatacatagagtttctggccaaaagaggtattggtgaggatttcttttttgttgtcatgagggacatatcttctaagaagattctggagcgggaattctctatgaatgaacagctttttaaggacttgtttgacagagcagttgacggaatcgtcctgtttgataaagatggcggttttattgatgcaaatttgtccttttgtaaaagctttgaaatcaatcataatgagctgtctcatttatctttgtatgagttcatagacagcggctcacgaaaagatttcgacaatatctggaaggcgctcaaccgcaagggaaaagcgaagggggagctgcctgtcaagcttcgttcaggagttcaaaaactatttgaattcacgattacatcaaacatcatcagcggtttttatatgtccattatgagggatatcacagagaagcggtctatggagctgcagctctttaaaagtgaggagcgcttcagagaaatctttgaaaatgcaatggacgccatcatcatctggtcgaatgacggaagaatcgtaaaagcgaatcaatcagcctgtaaaatttttgagctgccgatgaatttgctgttgaaaagaaagctgtgtgattttctcgttgactcgcagcagaaatacagcataacgaagaggaaatacgcaaaatacggagagatcagagaagagctgctgtttcaaatggggaacggccaattcaaagagcttgaatttacttcaaaacggacaatccttgaaaatcagcatttgacgatcttaagaaatgtaagcgacagaaagcggatggaaaaggagcttcgggaaagcgagctgaaattcagaaaagtgttcaacggatcaatggacggcaatgtattgttcgacaatcaatacaggatcatcgacgccaacccgttagcaagccatattttgggcctgtcacatgaagagatcaaacagcacagcctgttagatattatttctgcttatgaaatagaaaatttggcatcaccggcaaggcagattaattttgatgaaatggacaacgaaattccatttttgctgagcagcggtgataacagaaaactcgaattctcatttaaacggaatattattcaaaatatgaacttggctatctttaaagacgtaacagagcgaaaagaattggaggagcgcctgcgcaaatcagatacccttcatgttgtcggcgaactcgcagccggtattgctcatgaaatcagaaatccgatgactgctcttaaaggcttcattcagcttctgaaagggagtgtcgagggagactacgccctttacttcaacgtgatcacctcagaactaaagcgcatcgaatccatcatcaccgaattcttgattttagccaagccccaggccattatgtatgaggaaaaacatgttacccaaattatgagggacacgatagaccttctaaatgcgcaagccaatctcagcaatgtacaaatgcaacttgatttaattgacgacattcccccgatttactgtgaaccgaatcagctgaaacaggtttttatcaatatattaaaaaacgccatcgaagtgatgcctgacggcggaaatatttttgtaacgataaaggcattggatcaagatcatgttctaatctccttaaaagacgagggaatcggaatgacagaagataaattaaagcgacttggtgaaccgttttatacgacaaaggaacggggaactggacttgggcttatggtaagctataaaattattgaagaacatcaaggcgagattatggtagaaagtgaagaagggaagggcaccgttttccatattacgcttcctgtcagacagaatgctgaagaaagaaggaatgatgaatgaactactatacgacagccgaaacgccgctcggtgaacttatcattgccgaagaggaggaccggatcactcgtctatttctcagtcaggaagattgggtggattggaaagaaacggttcagaatactgagcataaggaaacacctaatcttgcagaagcgaaacaacagcttcaagaatatttcgcaggcgaaaggaagacattctccctgccgctcagccaaaagggcactccttttcagcaaaaagtgtggcaagcgctggagaggattccatatggcgaatcccgaagctatgcggatattgccgctgctgtcggcagtccgaaagcggtgcgcgctgtcgggcaggctaataaacgtaacgacctgccgatttttgtcccgtgccacagagtgatcggcaaaaacagtgcgttaacaggatacgccggaagcaaaacggagatcaaagcatttttgctaaacatcgagcgaatctcctataaagaaaaataaaacatatggcacgttcccttttttcacggccgacatatcattttattaagttaaaaaagttggtctgatgaaaaaggaggacaaagcaattgaagccgagccgctctgagaaacttgccgtttttgccgaactgtttgtgaaactgcatatcttatcaagcgctcaaaaagatgaaatcatcaatgttaacaaaaagaaacaaaaaaaccgctgactcggctccaaatgagcaaagtccagcggttttttaatgcaccttttctcctttaaacagctgttcaatctcttcttcatagtttccggtcataatccctttttctgtgatgattcctgaaatgagatcatgaggtgtaatgtcgaaagcgggattaaagacaggcacattggatggagcggtccgaactccggaaatctgcctgacttcctcgggatctcgttcctctatcgggatatcagcgccgcatttgacctttgtatcaaatgtagataaaggtgcggcgacaaaaaacggaatatcaaaggcgtttgctaaaatagcaagaccgtatgtgccgattttatttgccgtatcaccgttctttgcaattcggtcggctccgacgataacagcggaaatttgtttttccttcatcgtatgggcggccatgctgtctgtgatcagagtgacatcaatgcccccctgcatcagctcccaagcagtaaggcgtgaaccttgcaggacaggccttgtttcacaggcataaatgtgtaatcccaaatctttttgtttggccaagtaaaacggagctagcgccgttccatagcggcttgtcgcgattgagccggcattgcagatcgtcatgatcctgtcgccttttttgaaaagctgcagggcgttttggccgatcaaccggcacgtttcctcatcctcgacctgaatctgaatggcttcatggacaaggtttgtttttgcttcatttacggaaatcgcgttttcgaccgaatgactcagtctctcaagcgcccatgacaaattaatggcggtaggccgtgagctgtttaaatattgtttgatgtcttccagtctgcggcggaattccgtgacattgtctgtttcaatgtctttggcagcaagcgccagtccgaaggcagctgtaatgccgatcgccggagcgccccttactttgagcgtgacaatcgcatcaaatacatcctctttcgtcgtcagctccaaatattccgtctcatcaggaagcttttgctgatttaaaatggtaatagctgtttctttccattcaacagaacgtggaacagcaaatgaatgggtcatgaatagatcattcctttacaagtaacttaaataattcaataacatctgttatcgttttgaattccgaacgtttttcgataaaggctgtgccggtttcgagcgccaagcgttttctgccgattcgtttatcaaacggcacgatcgtatccaggtcagctacatgggcaaggccgatcgtgcgtcgtatcagctcacagcccgcaaatccgattgcttcttcaaaaatatggctgagcgtatcagtgaggtaaccgtcgatgttggcgtaaacatccagactgtccttctgccaggcttcactaaacgtctcttcaaacgtttcccagacctggttgacatgttcatataacggctctctgtcagccccgtcacggctgagtgcgttcaaaaataagttggcgataaattgccctacatcaaagccgatcggtccgtaaaaagcaaactcaggatcaatcacctttgtttcgtgctcacttgcgaaaatgcttcctgtatgcaaatcaccatgaatcaacgtttctgcagacgttaaaaatgactttttcagcttagcggcttcgattttaacgctgtcattattccaaagcttttcgacaaaaggacgaagctcttcttcaaaatcatttgtgtcatggtcgaagaaaggatctgtaaaaacaagtctttccgtaatgtcgcatagctctggatttgtaaactgtttaacaagctgttttttcaccttaggttcaagcgcgtaatctgatgagtagaaaagtgtttttcctaaaaattcaccgatgtgctgcgacagatgaggatagttttcaccctcaatgagtccttttcttgcgatcttgaggtgagagagatcctccatgacggtaaccgccatttccgtatcagaataaaacactcttggaaccaggtgaggcacatgctcgccctgacggatgagagcgctgctttcgattcttgcacggtcgattgtcagcggccagctttctcccaccacttttgcatacggaaccgcctgtttaatgatcaatgctctgtcatgttcttgatcataaatatgaaaaacgtaatttaagttgccgtctccgatctcctggcatgtcagcgtgcttttgcttggaaataggccaagcttcaccgccaacgccacagcggagctttcatttaacgtttcgtataaaggtgtttttgtgactcccatcatcataacctccaattatgtaattaattaatatgtggccgtaaaaaagcctccttctcagagagaaggaggcttaacatctatgtccgcctctcttatctctcagatcagatctgaatggaattagcaccgtgccttaagagaccagcgtctcggcgcgaaaaaaatgcgccccatttcacaatggaattacggtcggttgctgttggggtcaaaaggccaaatccctcgcccaactctcgataagagaatatattcacttgtttgacaattctaatttatcagttgatgaacatggtaacaggtaatttagttagttgtcaatatattttttaatataaatcttttctgatatcatcgaaaacaggaatgctctcccgaacttctgcgctttcttgaaggtcgatttccgctcggactatgccttcttcccggccgccttcagcaagtacacgtccccatggatcaataatcaggctatgtcctgcaaattcattatccggatttgaaccggtacaattgcaggctgcgacaaagcattggttttcaatggcccgcgcaataagcaggcttttccaatgatcaaggcggggaagaggccattccgcagaaataaacagcacgttggcgccttttgtcgtatgttttctgatccattccggaaaacggatatcgtaacagatcaatccagagcttttgacgccgtcaagctcaaagtatccgtcttcggaaccggctgataaatacagatgctcatccatcagctgaaaaagatgggcttttctgtactctttaatgatttgcccttccttatccgcgatgtacattgtattataaacatcagaattcttcctgacagcgaccgatccggcgacaatatgaacaccatgtttttttgccgttttcttcagccagctctgagcggagcggccgtcttcgtcagcgagttcatcaagattggccagatcatatccggtcgtccataattcaggcagaacaagaacatcagcatgtttgctttctttttcgatgaaaaattcagccttttttatattttccgaaggttttccgtatgaaatatcaaattgaagacaagatatcgtccatttcatctttttaacaccccaaatttttctttacttttttcatttaaccatatatgatgatggactatcatttcaagatttttttagaaggtgagaatagatgaaatttgaacagtctcatgtattgaaggaattgcctaaacaattcttcgcttctctggtgcagaaagtgaaccgaaagcttgcagaaggacatgacgttatcaatctgggacagggaaatccagatcagccgactcctgagcatattgttgaggagatgaaacgagctgtcgctgatcctgagaatcataaatattcgtcttttcgcggctcataccgtctgaagtcagcggctgctgcattttacaaaagagaatacggcattgatctggatccggaaaccgaagtcgctgtattattcggcggaaaagccggtctagtcgagctcccgcaatgcttgttgaatcccggtgatacgattttagttcccgatccgggttatcctgattactggtcgggtgtcacacttgcaaaagcaaagatggaaatgatgccgctcgtaaaggacagagcgtttctccctgattacagcagcataaccgctgaaataagggaacaggcgaaattgatgtatttgaattatccgaataatccgactggagctgttgctacttccgagttctttgaagataccgtgcgttttgcggctgaaaacggaatctgcgtcgttcacgattttgcttacggcgctgtaggatttgacggctgcaagcctttaagctttttgcagactgaaggtgcgaaggatatcggaattgaaatttacacgctgtcaaaaacgtataatatggcaggatggcgggttggctttgccgtcggaaacgcttcggtcattgaagcgatcaatctttatcaagaccatatgtttgtcagtcttttcagagcgactcaggaggctgcagcagaggcactgttagccgatcagacgtgtgtggcagagcaaaatgccaggtatgagagcaggagaaacgcttggatcacggcatgccgggaaatcggctgggatgtaacagctcccgcaggttctttttttgcatggctgcctgtgcctgaaggctatacttctgagcagttctcagatcttttgctggaaaaagcgaatgtggcagttgcggctggaaacggcttcggtgaatatggcgagggctacgtcagagtcggacttttaacaagtgaagaaagacttaaggaagccgcttatcgaattggcaaactgaacctgtttacccaaaaaagcattgacaagaccttataacgatgggataattcaaaataatttataaaatctatattttcttatcaagagcaggcagagggacgagcccgatgaagcccggcaaccgacttataaagcacggtgctaattcttgcagctagcggctgagagataagattcggacgagaaacgaaacctctttagacgcgattgcagtttgaagaggttttttgatatggatgaaaatgaaaggagctctggcatgagtgagttattagcgacatatctcctgaccgaaccgggagccgatacagagaagaaagcagaacaaatcgcaacaggattgacagtaggctcctggactgatctgccccttgtaaaacaggagcaaatgcaaaagcacaaggggcgggtgataaaagttgaggagagagagggaactgctgcatcagaaaaacaagcggtcatcacaattgcctatcctgaaatcaatttctctcaggatattccggctttgctgacaacagtgtttggcaagctgtccctggacggaaaaatcaaattaatcgatcttcacttctctgaagcatttaagcgtgcactgccgggaccgaagtttggcgtatacggcatccggaagctgctgggagagtttgagagaccgctgttaatgagcatatttaaaggcgtaatcggaagggacctgagtgatattaaagaacagctccggcagcaggcgcttggcggagttgacttgattaaagacgatgaaattttctttgagactggtctagcgccttttgaaacaagaattgcagaaggaaagcaaatattgaaagaaacgtatgaacaaaccggacataaaacgctgtatgcggtgaatttgaccggacgtacggctgatctgaaagacaaagcgagacgcgccgccgaattgggagcggatgcgcttttgtttaatgtcttcgcttacggcttggacgttatgcaaggccttgcagaagatcctgaaatcccagttccgattatggcgcatccagcagtgagcggagcgtttacgtcttctccgttttacggtttttctcacgctcttttactcggaaaattaaaccgatattgcggtgctgacttcagcctctttccgtctccatatggttcggttgcgcttccaagagcagatgcactggcgattcatgaagaatgtgtgagagaggatgcttttaaccaaacatttgctgttccgtcagcaggcattcatcccggcatggttccgctattaatgcgtgatttcggcatagaccacattattaacgccggaggaggcgtacatggacatccgaacggtgcccaaggcggggggcgagcgttcagagctattattgatgcggtcctagaggcccagccgattgatgaaaaagccgaacaatgcaaggatcttaagcttgcgctagataaatggggaaaggctgaagccgtatgacgactcgaaaaccttttattatttgtgattttgacggaacaatcacgatgaacgacaacattataaatatcatgaaaacatttgctcccccagagtggatggcattaaaagacggcgtactttccaaaacgctgtcaatcaaggaaggtgtcgggcggatgttcggccttctgcccagcagtttaaaagaagagattacaagttttgtattggaagatgcaaaaatcagggaaggctttcgggaatttgtagcatttatcaatgagcacgagattccgttttatgtcataagcggtggaatggacttttttgtatatcctttgcttgaaggcattgtggagaaagaccgcatttattgcaaccatgcttcatttgacaatgactatatccatattgactggcctcattcctgcaagggcacatgcagcaatcaatgcgggtgctgtaagccgtcggtcatccatgaactttctgaaccgaaccaatatatcatcatgatcggtgattcggttacagatgtggaggcagcaaagctgtctgacctatgctttgcaagggattatttattaaacgaatgccgggagcaaaacctcaatcatcttccgtatcaagatttttatgagatcagaaaggaaattgagaatgtaaaggaggtacaggaatggctgcaaaacaagaacgctggcgagagctcgctgaagtaaaacgggaattggcagagagagattggtttccggcgactagcggcaatctgtcaattaaggttacagatgagcctttaacatttctcgtcactgcaagcggaaaagataaacgcaaagagacggttgaagattttctgctggtcgatcaaaacggagagcctgctgaaagcgggcattctctgaaaccgtcagcagaaacgcttttgcatacacatttgtacaataaaaccaatgccggatgctgcctgcatgtccatacggtaaacaataatgtgatttcagagttatacggagaccaaaagaaaatcacattcaaaggccaggaaattataaaagcactcggcttgtgggaagagaacgcagaagtgaccgttccgattatagaaaatccggcacatatcccgacgctagcggcactgtttgcggaagagatttcagaagattcaggagctgttctgatccgaaatcatggtattacggcttgggggaaaacagcatttgaggcaaaaagagtgcttgaagcgtatgaatttttgttcagctaccatttgaaattgaaaacactcgagcatcagctggttaaataaaaggaggaattgaaatggctacaattcgaattcatgatgaggcaaatacaacgattgaaaatcaagaggaagtggcaagctttctggacagtcaagaggttatttatgagcaatgggatatcacgaggcttccggaacatctctcagagaaatatgacctgacagaagaagaaaaacagcaaattcttgataccttcgaaactgaaattaaagatatctcaacccgccgcggctataaagcacaggatgttatttcattgtcagacagcaatccgaaacttgatgaactgcttgaaaactttaaaagagagcatcaccatacagacgatgaggttcgttttattgtaagcggacacggtatttttgtcattcaaggccaggacggcacgttttttgatgtccgtttaaaccctggagatttaatctccgtgcctgagaatatccgccattacttcacgcttcaggaggaccgcaaagttgtcgcggtgagaatttttgtcacaactgaaggctgggttcctatttatgaaaaagacagcgtgaatcaataagcgtgagatagccccgttcatcgaacggggctttttatatttattgcaaacgccacttttcatattgtgacagttcttttttaatcagtgtccaaatcaaacctaaaacagctgcatcgtcaatgaatccaagaccgaggattacgtctggaatgatatcgagcggcatgacgatatacaggattgcggcagttaacagcaaaagtgttttaacctgtgaacgagggtagtcgccatttcgccaatcgcgaagcatctgaaaaaaagtagtgatgtgctggatacatttttttcggtttttcctctttaaaatcgcttttccgcctgccgctccgagcattattgctttctttttcttcattgggcatacctcctgcctggcggcgtgtttaagatattcttcacctgggtattgttcttctaatcctatcaatatatctattatacctgaaaaattaacttatttaatgaaaatatgtttacaaataaagtataatctgtaataatgcacaataacccaatcaaacttgtttcctatttcttagcggcgaggggtgaagtgaatgggcggttcttctgaacaagaaagattgttggtgtctattgatgaaaaaagaaagttaatgatagatgccgctagaaagcagggatttacagggcatgacacgatcaggcacagtcaggagctggattgtttaataaatgaatatcatcagcttatgcaagaaaacgaacattcccaagggattcaaggccttgtaaagaaattaggcttgtggccccgcagagatgttatgccagcatatgatgcaaataaatagcggcctatcagatgcatatataaagagagagcttttcggaagcgctctttttttctggaaaaaattcatatgaaagagggaactaatgaaggaactggcgattctcattaccgaaatggtcaatcaatttcatgatgcttttatttccttatgcggaatatttggcattcatttaactgacaaagaaatgcatttttgggtgatcggcatttttggcatattctttttcggcgtcactcacgctgtgtttacatggctttctaaatggagtatgacagccttgtcctttatctataccgttacagtcatcattgtcatcgtatttgcgattgagattcagcaaaaggtgacggggagagggaatatggagtttttagatgccacggaaggtataaagggttttttagtattttttatgttttttttgcttttgaaaatgctgttgcgtttcatcaaaatccttttttctggaagaccagcaagcaaatcgaatggcaatgcccgatcacgaagataaaaaaccctcctgacatggtcaggggggctatgatgcggatacggggagggtgatcgtcacctctgtgcctcttcgcacttcactttcaatatgaatagagcctccgtacatcagcacgatccgtttacaaacaacaaggccgagaccggttcctttttctttagaagtaacaaagggaaggaagatgtgatccagcatttcctgagaaatcccttcaccgttatccacaactttgattatggcttttttatctaaagctcctagggagatcgtcagtttgcctccttcaggcattgactcgaggccattttttgctacatttaaaatcacttgtttaatatgatcttttgtacattttacgagtaagggctgctcggttagatactgtaattcgacttcaacattgtatagattgccctcagaataaatgatcggcataatttctccgataatgtcctgaagtgagttcagctcccatttttcagctgtcggcttgccgagaacgagaaactcactcactatttgattgatgcgctttatctcctgttcgataatggagaagtaaagctgatcttcctcacctttatatttcttttgcaacagctgaataaagccgcttatcccggtgagggggttacggatttcatgggctgtgctggcagcaagcgtcccgatcagctctaatttttgcgcctcgttttctgagcgctccagctgggtctgccgcttcagcaaataatacagcacgagaataaaaaggatattcagcagaacaataatacatgaaagcggaagcacaaggcttttcgacagttcttctattgtgaccgggttcggatagactttcatattccagctgatatcatccagatatccgctgacaggtttctgatcctctgcatgagaggcttgtccgctcgcaaaaatcattttcccgtcttggttcacaacttcaatataaacatcagggcttagtaagttaatgagatttttcaaataatcaatttgaatagctgcgacaagataatctgtcacattacgttttgagtccaaaacaggcacacaaattgtgaaaattggctgaccagtaattctgctcgaataactatctgaaatgactgtctttttagtttcctttgcttttataaaaaaagatctgtcggccaggtttactttcgtttttaattcggttgtgcttgcggtgacgtctcctttggcattgagaaaatagagaccggaaaatctcggctctgaatcaaaggtcttttccaaaattgattgcattttctttatatcaaccggtctgtcgatggcgatggacaaggaggtcattctcgccattgtttctccgattaaataattgattttgttgcggtgaaggtttagcaggacacttgcttcttgtttatgttctgcagctattgtatctttttctttttcatatacgaaaaagctgatgacgattgccggaatcacgaccagtatgatataaagtttgactctcccgcaggcgccttttagtattttcaatttgcatcgctccaacatacacctgattagaggtattatatcattgtttcttcttctttaataagaaaaaataaccaaaaaaattagaaaaagatgttggcaagcttacattttaaaaaagaagagaaatattggaaagatttttattgacattttggtctttgtttattaatgtttctctgtaacggtttctaaaaggatgattgagacatgacagaaaaatcactgaagttatttatcgtgctgtcgcgcgcgtatcggtctattaacgatcatatgaataagcatattcataagcatgggctgaatccgactgaatttgctgtgctagagcttttgtaccataaaggcgatcagccgctgcagcagataggagataaaattctcttggctagcgggagcatcacatacgttgtagataagctggagcaaaaagaacttctcattcggaaagcgtctcctacagacagacgagtgacatttgcgcaaattactgaaaaaggcatcggtcttttgaacgatattttccctgatcacgctgctgaaattgatgaaatgatcagcgtattaagcgaagaagaggtagagatgtgcaccgaaatgttaaaaagagtaggattaaacgcaaaacagtttcataataagtaaaaaaaggaagcctgatatgtcacaaggcttccttttttgctatttttcatttgtttccgctgcgcctctcggcaaaatgagaacttcaacccgccggtttttgcttcggccttccgcagttttattggaagccaccggtttatactcgccataacccttggcgctgaacacttttgcatcgagcttggggttttcaatcaggagccccataaagtttaccgctctcatgacgcttaaatgccagtttgattggaattcagaatttttaattggcatattatcagtatgtccgctgataatgatatttcttggcgggttaatcacaagaagatttgaaatctcttttgcaagcggcacatcttccttacggatggtcgcttttccagaatcgaagaagatgctgtctttaatcgtaatcagaaggccttcactagtcatcttcgtctccagctgatgttccagctttttatctttgatgaacttttccacctggctcttcacattttcaagttcttcttgatcagctgctttttctttttctttcttgtttttctctttctcttctttttcctttttcacttcatcgatgccgtctgactcgttttcaggaggagtgacactggagtagtccagtacaccggttccgcctgtaaaaacttcattaaatgattttgagagcatttgaaacttagctgcgtcaatcgagctgctcgcgtacagcacaataaacaatgccaggagaagagtaaggatgtcggcgtaaggaacgagccatgattcatcaacgtgctcgtcctcatgcttcttcttcttttttctcgccattttgcgcctctccttgttctgcaaatttcaagcggtccttcgcaggaagatacattaaaagcttttgttcgatgactttcggtgcttgtccttctaaaacggataaaacaccttcaatcatgacctcacgcagttttacttcctgttttgattttcgttttaatttatttgcgaaaggatgccataacacataccctgtaaagataccgagaagtgtggcaacaaaggcagcactgatggcgtgtccaagctcatctgtgttatccatatgagagagagcggcaatcagcccgattacagcgccgagtactccaagtgtcggagcgtacgttcctgcttgtgtaaaaatagcggctcctgcttggtgcctgtcctccattgcttcgacttcctctgtcataatatctcttataaattccgcgctttgcccgtcaacagccatgctgagcccgtttttcaagaaagcatcatctacatcctcaatgcttgcttctaaagcaagcagaccttcgcggcgtgcaagctgagcccattcagagaacataggaatgagttcctctattgtgagctgtttattttccttaaataacactcgaaacagcgtaggcacttttttaatttcttttgttgggaacgcaataacgactgctgagattgtcccggcgataataattaaaatggcagcggggtttgcaagggcgctgaaactgacgcctttcagaaccatcccgacgctcaatgccacaaaagcaagaataataccgattaacgaagttttatccatagttttcaccaaatccttttttactagcttgtctatggttaatatcggttttggtgcccggaactttagggacattgtgaatttgttcatgaaatattcaaggaagaggcatagaagggagaaataaacaaaaacgggctctccaaaattgaaaagcccgggggtctactgaaattagcagcttgcttgcaagctgtccttcagatggtattcatataatagtagaaatacatattcactgtatataaacatgttccatccctccttaaaaaagtgtaaaggatgaagggaagtagcgcttcaggagaagggacggtaatttctaagtcaagagtatgaaagtataaaaaaaagcggcttcctaaaaggaaaccgctgattgttattttgctcgcactttgattttatcatcttctaaaatcacgtgaaaacttgtgatctcgccattatcaagcagcagatcggtcatttcatcctcaacccattcttggatggttcttctaagcggacgtgcaccgaatgaagggtggtagcccagctcagcgattttttctttcgcttcatctgtcacattcaagctaatgccccgttccgccaatgtttcttcaagttctccaagaagaaggctgacgattttgacaagatgttctttttccaatgagcggaactcaataatgctgtcaaaacggttgaggaactcaggtttaaagaacatgctcagtgaatcaattaatgtttgttcttcgatgacactgtcatctgattggaaaccgactttcgtttgtttctcaccagcacccgcattacttgtcatgatgatcacagtgtctttgaagcttacagttctgccttggctgtctgtcagacggccatcttccataatttgcaggaacatatgctgaacgtctgggtgtgctttttcaatctcatccagcaacacaatgctgtaaggattgcggcgcaccttctcagttaattgtccagcttcctcatggccgacatatccaggcggtgaaccgataattttagatacggcgtgtttctccatgtattcgctcatatcgagtcggataatagcgtcttttgtgccgaataattcatctgccagtgttttagaaagctctgttttccctacgccggtaggaccgacgaagaggaaggagccgactggtctgtttttggattttaatccggcgcggcttcgtcttaccgcttttgccactttttgaacagcggcttcttgtccgatcacgcgttcatgaagttttgcttcgagttctttcattttcgtttgttcgtctgcctgcagtttgccgacagggatgcctgttttttgttcaacaatttcctgaatgtgctcagcttccacagtgacagcggtatgagcggaggagctgttcagttttttctccaatgcgagttcttcatcacggagttttgccgccagttcgtaattttcttcttccagggcttttgttttttcggcttcaattgcagttaagcgttcagcggcatcctcatcattcagttcatcaattaacaggttggcttttgaacctgcttcatctaataaatcaattgctttatccggcaggtgtctgtcctgaatgtagcgggatgataaagtgacacatgctttgattgcttcatcactgaatgttacgccatggtacgcctcgtatttgtctttaatcccttgcagaatgaggatagcctgttcaattgaaggctcctgcaccatgacaggctgaaaacgtctttccagcgcggcatctttttcgatttgacgatattctttcagtgttgtcgcgccaatgacttgcagttcgcctctggctagggccggtttgagaatgttgccggcgtccattgatccttctgcagagcctgcgccgacgagaaggtgaatttcatcaatgaacagaatgacattttttcgttccttcagctcagtgatcagctgtttcattctctcctcaaattggcctctgatccctgtgtttgcaacaagagatgcaacatcaagcaagtatagctctttgttttttagtttgtttggaacatcaccttcagcaatttttaaagcgagcccttcagcgatggcagttttccctacacccggctcaccaataagaaccggattgtttttgtttcggcggtttagaatttcgatcactcgcgccacttcatcatcacggccgatgacgggatcaatgagaccggcttttgcaccgtttgtaatattttgagccagctcatcaagcaacccttttttttcgctttgttttgctgcgctctgttctttcggctggaatgcctgttcaaacggaaatccgaaagattgaggacccatactcattgaaggtttacgggtcagttcgttatagcaagtttcacaaagaaccatctgtttatgaacggaatttatttgcatgttaaggcgaatcgtcgcctcgttttgatgacaatgttgacaacgcatttgccaaaacctccttaataatttgatcatctttgaccaatgaaagtgaataaaaaggtctattgggtttgaccttctttgactattagtatacggcaaacttaacggcattcaaaccaatatgctcaaagcagactgaatatttgactatctttgaccaattgatttttaaaaaaggccggtttgtttgaccaactttgattaatagtatactctgactatctttgactttcaagtcttatgcacaaaaatttttgatttgttacaaagtaaaacatgttttcttcgtcttttcaaggaacttgtctcataggttataaaaaggcatatatggacaaaactgcggttcgttcggagggaagaaatggaacaatcaaaagggtctgcaagtcagcttgcttttgtgtatgtcggcacagtagtcggagctggatttgcgactgggagggaaattgttgagttttttctgaagttcggctggttcggttttttcggcattctcgtcagcggcggaatgtttacgttactgggggccaagctgatgatcatttcaaagcgaatcaatgccaagtcatatcaagaaatgaacatatttttgttcggggcgacggctgggcggattatcaatgtatttatgctgtttgttctccttggagttacatctgttatgctttcaggggcaggggcgctttttgaggaacagctggggatgtccgctcagattgggatgctcattacaatcggtctgagtttaattgtgatgactagaggagtaaaaggcattttcggtgtcaatgtgtttgttgttcctcttttaatcatcttttcaatgattgtggtggccgactcttttatattcagcgaatcacgaaacgcagctcagtgggtctggccgcatcgctgggattggctgttatcagcagtttcttacggggctttaaatttatcgcttgcccaagctgttttggttccgctggcgaatgaaatgtcatcggagaaagtgataaaaaaaggcgctttaatcggaggcacgatgctgacgattgtgctgtccgcgagttttctgtctttgtcgactcttccggatgtatttttgtatgatataccgatggcgcaagtggtttatctctttgcacgatctgtccatttgatttatttactcattattttcggagaagtgttcacatcagttatcggtaatctatatggattagaaaaacaagtgcaaagctttcttccagtgaaaagcaaatatatctttgcagccattatgatcacggcttatattacgagccaaatagggtacggcaggcttatttcaacgatttatcccttgtttggctatgtgagcctggccttcataggcgctttgctttgcaaaaaagctcctcggcggcgcagtttataaatatatataatgaaacgaaccgtcactatagagcgataattgatctaggaaccggggactgacttttttattgtcaagaaaaacatcattatggtaagatagcagaagtgaaaaaattgaagaaaatccgtgcgatatgcgggagaggttctagctacaccctctataaaaaactaaggacgagctgtatccttggatacggccttttttatgtttttctagagcaccttccgaaaaaaggtgtttttttgcgtgaattagctgtagcgatgtctctcgccggcgtttttattgcggagaaggagaggaatcatgaaaaaagaaaaagcaattgtcgtatttagcggcggtcaagacagcacaacatgcttactgtgggccttaaaagaattcgaagaagtcgaaacggtgacttttcattataatcagcgacattcgcaggaagttgaagtggcaaaatccattgcggaaaagcttggtgtgaaaaatcatttgcttgatatgtcacttttaaatcagcttgcaccgaatgccctgactagaaatgatattgagatagaagtaaaagacggcgaactgccatccacattcgttccaggccgcaatttggtattcttatcctttgcgtctatcctggcttaccaaattggcgcgcgccacattattacaggagtttgcgagacagacttcagtggttatcctgactgccgtgacgaattcgtgaaatcttgcaatgtcacggtaaatctggcaatggagaagccgtttgtgatccacacgcctctcatgtggctcaataaggcggaaacgtggaagcttgcagatgagcttggcgcgctggattttgtgaaaaacaacacgctgacatgctataacggcatcatcgcagacggctgcggcgaatgtccggcatgtcaccttcgttcaaaaggttatgaagaatatatggtgatgaaaggagagcgtgcataaattgttatctcaaatttatccgcaggcccagcatccttattcgtttgaactgaataaggacatgcatatctcagccgctcattttatccctcgggaaagtgcgggagcgtgcagcagggttcacgggcatacgtataccgtaaatataaccgttgccggcgacgaacttgacgattcaggctttcttgtcaatttcagcgtactcaaaaaactggtgcacggaaactatgatcacacgctattaaatgatcatgaagatttttctcaggacgaccggtattcgctgccgacaactgaagtcgtggcgaaaacgatttatgacaacgtacaggcttatttagacactttggagaataagccgacctgtgtacaggtgtttgtccgtgaaacaccgacaagctactgtgtctaccgtccgaaaaagggtggtttgaatggctaaaggaattcctgtattagaaattttcggcccgacgattcaaggagaaggcatggtgatcggacagaaaacgatgttcgtccggacagccggctgcgattattcctgcagctggtgtgactccgctttcacttgggacgggtctgctaaaaaagatattcgctggatgacggcggaggagatttttgcggagcttaaggacattgggggagatgcgttttctcatgtgacgatctcaggcggcaacccggctctgttaaaacagctggatgcttttattgaactgctgaaggaaaataacatccgtgcagcgcttgaaactcaagggaccgtttatcaggattggtttacgctgattgatgacctgacaatttctccaaaaccgccaagctcaaaaatggtaacgaactttcaaaagcttgaccacattttaacttcacttcaagagaatgatagacagcatgctgtcagcttgaaggttgtcatctttaatgatgaagatctggaatttgccaaaactgtgcacaagcggtatccgggaatcccgttttatttacaagtcggaaatgatgacgtgcatacgacagatgatcagtcactgattgcacatttgcttggaaaatatgaagcgcttgttgataaggtagctgtcgatgcggagctgaatctcgtcagagtgctcccgcagctgcacaccctgttatggggcaacaaacgcggagtataatagaaaggaagatgaacatgacgacaagaaaagaatcagaattagaaggtgtaacattgctaggcaatcaaggtacaaattatttgttcgaatatgcaccggacgtgctggaatccttccctaataaacatgtaaaccgtgattactttgtaaaattcaattgcccggaattcacatctttatgtcctaaaacaggccagcctgactttgcgacaatctacatcagctacattcctgatgaaaaaatggttgaaagcaaatcattaaagctgtatctattcagcttcagaaaccatggtgacttccacgaggactgcatgaatatcatcatgaacgacttgattgaattaatggacccgcgctacattgaagtatggggcaaattcacgccaagaggcggaatttccattgatccgtacacaaactacggaaagcctggcacgaagtatgagaaaatggccgaataccgtatgatgaaccatgatttgtatccggagacaattgataatcgttaattattccgttgtgtgatacggagtgtaaaaggaagtggagtcacagtaaaatccgaacattcagcgttaattttcagcggaaatgtgacctggtcacagcgaagtgtgacccgcactaagctcaataaaagtgggaaaagtcacacctgaaaatggctctactcatgggaattgtattaaaaagtgtgacctgaggtgcaacctgaactgtgacttttatgcagtgaaaaattgatagtacagaagcagattaaggcgtacaatttgtacgtcttttcttttttatccgaaagaaaaaatgcctatctagagatcataggcattaaatattattatcaatatcttcatttattttttggctaagtttctgaaccttctctttaacatttgaaacagctcttttttgaatttcatcaattctcctgaatatagtcgatgacacttcttattagaacttcactttcaaaattgaatatctcatttatttctgactgttcttcatctgttaggtgatggtattgaagttgtttagcatttacttcagcagctacatcaatcctaacttagttgttctggttgtacaatttcatattcaccttctgcatactcttgctccgcataatagcctccccattgacagagctcctgcaagataggtttaagagattctccaagttcagtggatgaatattcaaccttcggcggtacttgattatacatctttctgctcacaagtccactggcttcaagctctctaagtgtttgaatcagcattttctgagttatatttgggataatgcgctttaattcactcgttctctttggtccattcattaaaaagtataatacaaggcctttccattttccgccaataacttcctttgtcacttcaaacccacagctaaattttttcatgtctaaagctctccattccacatttattactttttagttactatatcacaaaaaagtgggtacttccgataatgtgcttactgaaggatactatatcttgtaagttgttcttcaagtacttaaaggtactagacataaaataaaattaattctaaaggagtgttaagtatgggtaaatttgaaggtaaaatagcgcttgtaacgggtggaacaagtgggattggtcttgctacagcacaaaaatttgtaaacgaaggtgcatatgtttatattacgggacgtagacaaaacgaacttgataaagctgttaaccaaattggcaagaacgtaaccggtgttcaaggtgatatttctaagcttgaagacttagacaaactatatgacattataaagcaggaaaaaggtaagttggacattctttttgctaatgcaggcatcggcaacttccttccattaggtgaaattactgaagagcaggttgatagaacgttcgacattaacgttaaaggaaccatctttactgttcaaaaagcgttatcactattcccggacaaagtaggttctattattgtaacgggctctactgctggatcaattggcaacccagcgtttagtgtatatggagcatctaaagcagcattaagagcactagttcgcaactggattcttgacctaaaaggtactgaaatccgtgtaaatgtggttagtccaggaggtattcttacacctgcctacgatgagctttttggtgatgcacttgaagaggtactggaaaatagcagaaatactgttccagctggaaaagttgggacacctgaagaagtagcaaacgctgtatctttccttgcttcagacgaaagcagttacttgacgggtgttgaattgttcgtagatggcgggctagcacaggtataatttcactgcgcagagattacaaatagtccccaaaaaaggttaatggggatttacttgaagaagtcgtataaaaaagtcgttttccttaaaggacagggaattcgacttttttatatttgaatttgattaacgttgtaaattcgcattttcctggggctactactaaatgacctgtaaaaaagattacactgtgaataaatgtacttaaagtaacgggggctcttgacttttaataaaaaataatatccctgtccttgtattctaatacttttaaaaatatttaaaggaatccttatgtcctgaataaccacataggaaaatatgttgtaggttgctttctttttttgtggggcatcccacacaagctatctcgtgatctcacacctgaacgttttttatagactagtaccgcgacaagttatattacatatacataccaataaagtagacattaaaaagtgaaagagaggatggaaatgtgtgaaaattcttttccttgagagtcatcccatgtggctctatggtttaccgaatgggtttagggaagcaggacataccgtaatgatttccggtcctgtaagtcgggaaaatataactgaaatgatagacgaatttaaaccagatttaatagtatctatgggatggacaccagagcattcaagggaaaagcaggcctggattcgcaacgctactaaaaaggtgaatatccctctcgtttattgggcaactgaagacccgctgcacactcaaaactttactatcccgttaattaaaaagatgaaaccggattttgttttcacggtcacgccttctctgtgtaaaacttatgaaagcatggggattaaagcagctcacttagactttgcatttcacgaaagtatacatcaccagattaaaccattagcgaaatacagttgtgatatagcagtggtggctaatgcttaccctaattttcttgaagaacatccggaagtgttccgttcgtcctctttaaaaacgcttattcgtcctcttatacggaagggtattcgcattgatttttgggggagaaactgggaaaaaatgagtaaatatataggaagagaaattccccgcaattggatccatggataccttgattatactgaagcatataaagtttacagttcagcaaaaatcattatcggtttgcaaaactgtgaaagccaacttacacaacgcacctatgagattcttggttccggggggtttttattgacatcggatacaccagcagttcgaggtaaattcaaacctggccgcgatctcatcgtttcttcctccccaaaagaaacattggaaaaggttaaatactatttaaatcatgatagcgagagaaaaaagattcagataaacggtaaaaaggctgtaaagaatgattcctatcggcatagagccgagagaatgcttgaggtgctaaaaagcagaggaatcataagaaacttaggggaaaccattcattatgtagatgttctcaaagaaaaatacgtgatccatcatgttactcccggtgaaacattatcaataattgccagtaagtataatgtttccctgcagcaactcatggagcttaatcatttcaaatcagatcaaatatatgctggacaaatcattaagattagagagaaactgtttagaaatattaataacaaattattctaaaggagagtaatatgaatgaaggggaaaatacctaaaataagaaatcaagcgaataaagtaaaaagaacgcctcgttatatggaatttcccgtgacatacgaagtatatcatgtggaatccggcgatacattatggacgattgccaaatcctttgaaattccggtacaacaacttatgaatcttaataagctttcttcagatagaatttatcctggacaaattataaagataagagaaagataatctttgaggtttcggaagcgaatcaaattgaaatgacaatcctcatttttttatttgtggggaacttgatatttttggggatgaaggggttatgagatgtttcaaatgagctattactattctggattaggatgggactttattcaacacgttgatcaaacgaacggagtattaaatgttgtgtctcctgattttttctatatcagaaaagatggatcattacttctccgttcagctaatcccgatgtgattaaagctcttcatagaagaaaattaaaagtagttccttttctaagcaatcattgggatcaggatttgggacgatttgcattaatgaaccgagttcttttagctaaacaaatttctcatgcaatagaagaactggatttggatggagttaatatcgatatagaaaaccttacagaaaaagatcggaatctatttacagattttattagattagtaaggaaaagtattcctagacataaagaagtatcagttgcagtggcggcaaatccttttggctggacgaagggctggcacggatcatatgattacgagtatttagctaaatatgcagattatcttatggttatggcctatgatgaaagccgccttgctgggcctactgcaagtgtaggatgggtggaaaagtccattcaatatgttctgacccaaaaaatctctcctcaaaaactagttttaggattgccattctatggccgctgctggatggaaggccaatctgcctctcaagccattcccctttaccttgttgttagtaaaaaggcatagcgggacaattatttttgacaccaagagtcaatctccaaaagctatttttactgtcaatcacgataaaaaggggccgttgccttcgggaacatatacattatggtttgaaaatgaacagtcactcagagcaaaaataaaactcgctcaaaaatataatctgaaaggtcttggcagctggagtcttggacaagaagatgcgtcagtctggaatacagtgtttaaaaatatataatgatttatagttcagaacaaaattcgaagataattgcaatgaatctctaaatggacatactgaaaggagtttattacgagtgcgggtaaaacagtgagggcattccataggcccttctcccaaaatgttctacacgaggcattacattgggcttgaaatacacattcaaacttatgttatagtacgcattttacggatgtgttgaatttattctgcttccatgatttaatcatacacatgctacttgatagcagggttatcgcatttcattcagaattgttcaggatcgatatggaagcgcacgactaactagaactttaaaagcatacactcatatacttcctgaatggatgctggtttatctaaaaaacatgatgagaattgattgtacgcatggtgaagcatgacttgttgataatcgaccatatggtttctccttagaaatgagggggtttttacataaaaaagacgagcgaatccggggggaattccactcgccgctttctaatgaaaagacgggatgctggatggcagctcgtctgttttattataatttaacgaacgtatgtttgtaaaggtgtcttttcgaatgaattggttcatataaccgttaagaacagattcattgtaaacattcgctaaggtatgctaagatgcatggactataaaggagtgatatgaagtgaagacattgcggttaaacaatgtaacgttagaaatggctgcatatcaagaggagagcgagccgaagcgaaaaattgcatttaccttaaacgttacgagtgagacttaccatgatatcgctgtcctgttgtatgaaaaaacgtttaatgtcgaggttccggaacgcgatcttgccttccggggggaaatgacaaattattcaacatcattgaccaacctgtacgaaccaggggccgtcagcgagttctatatagaaataacggaaatagacaaaaacgccgattcatgatcggtgttttttatgtaaaaaagctgccggccggcagcttttgagaaagcgaatttcatatgtaaggtgttaaattgtccgtcttgcagttttttgaataaatgtggaaataaggaggttttaataggagtctctgatgatcttataatttttatgattaacaactgtcaatgaatctaactcaagatcccgatagttatccatgatcgtcacatcaacgataacagaattctcatttactttttcaacaacaccggttaatccgtttttaaattcaatgacattcccaaccttagcgattttcacaagcttcctctcctttaaacataataatgccttttgaaagtattttgcagtattttcattgagaagtaaagcgataaggagttttatctcccttatgaattgttctgtcgctataaagatgatatattgattttcgtcaatagaaagaaaaggggggaatttttgttgcgtcccgaagaaataacagaaatgattgaacagctgcgcaccggcgccataaacgaactgagagtccagaaagagcattttcttgatttcagggccgtgttatctaaacaagatgattttaaacatttccgaggaattgcccagcaaggcggagatgttatctttcaatacttagaacagccaagaagctgaaggtttctcatacgtgagaagcctttttatcatatatgacagaacacaagccttttattacagctgtctgtaacaggtgtaaataaaatgtaaagtaccaaagatggataaacatgttttaatttaacaatatttatagaatttcagactgtttttttgccattaagcagtgagtcatcctctttattccatcctgatacctccttgggagagttggaaaatctttttccgtgaaaatgaatggatctcttgttaaggttatgaagtgttttttggagcactttaaggaggaaactgtatgacaacgaaattcactgctctggctgtttttcttctttgtttcatgcctgcagccaaaattgagcatacacaagcttcactactgagcgcaaagaagacaaaacatgaagaagcgaaatggcttacacatatagatcgaaatacgaatgaatctttcccttcactgtctgctgataaagacaagaaaataaaaccgattaagctatcagcacacactgaaaagaaagagaaagataaaccggacaaaacaaatgatgagaaagaaacatatacacagtctgaaaaagagttgctgtcccgtctcgttcacgcagaggccaaaggagaatcatataaaggcaaggtcgctgtagcaagcgttgtactgaacaggacggagaaaaaaggttttcctgatacgataagaggagttatttatcagaaaaacgcctttgaaccggtcgcaaacgggagcattaaccaaaagcctgataaagaatcgattgaagctgccgaagaagcgctgtcctcaaaaaatagagaaacagatgccatattcttttataatccgaaaacagcgtcagataattggattcgttcaagaaaaatcgtagaaaaaatcggcagacacgtttttgccgtctaagcatagaagagacaatttgtctcagctgtgctttttttcatataaagagtaaaaataaaataatttttgaacttgtctcatatgatgttggtagtacaagagacaaggagagacatcatgaatcgatttgtgaaagggatcattcttttatccattgccgcctttttcgctgaatgccttgaatttgtcgtcaatatgattttggcgcgggagcttggcgagcatgggatggggctttacatgagtattttgcccacgatctttttaattattgtcatcgcgagcctggaactgccgatatccatttctaaattcattgccgagtcaaatcctaagcttcatgaaagcatgctgaggcacgctttcagaatgacagccatttttactgctttttctactgccgccgctagtattgcgcttccgtttattccggtatttgatacataccacccgtttattaaagggattgtcatcggcttaattcctgttgtcgcctttacttcaatcgccaggggctactttatgggtgtgcagaaaatggggaagatcgcaattgccaatgtgctgaaaaaaatcatccagctcttgtgcttattcctcttttttcaatggtactcatttgaattggacatggctgtgctgatttccttgtttgttctagtcgtgagtgatgtggtcgtgcttgtttatttatattcacaatttatcatggcaaggcgggcgttatccggccagcagcacattcatttgcgcggaaaggatgtaaggaaaagactgcttgctgtttcaattcctacaacaggactgcgtatttttcatgcggttgtcaatgcaattgaaccctttttagtaaaaggagctcttttggctgcgggcgttgccgggacagcggcgatcgatcaatacggaatgctggcaggagtggctgtgacgatagggtcgttccctgcttttattgcccattcgttaatggtcgtcatgataccgagtatttcggaagcttatgcactttctcagtatgacatcgtgttaaaaaggctgaagcagtcgattttcattacattaggttacggtatacctgccgtctgggtcatgttccagtttgcgggacctctcacgcatttgttttttcactctcctgaagcgcagtattacttgcagctgttgtggccttactttctctttcatctgtttgtcatgccgctgcaggcgtgcttaatcgggatgggttttgtgaaagaggctttttatcacaatgtatggagccatatcgttgcgctaagtatgatgtatgtactgggatcaatggagaatctgcaaatgctcgggattatccttggaatgaacactggcatgattcttttgacgagcctgcactatgccacgatctgcaaagcattgaaggtatctgtatttcttacgggagggaccagaacgccgcgaattgaaggatgataaaggaacagcaggggcaagctaattgaaaagcatgaaaggaagattccatgttgacgaagcgcttgcttactatatacattatgttattagggttgattgcatggtttccaggtgcggcacaagctgaggaaaaacagcctgctgttcccgctgtttttcttatgaaaacgatagaaggggaggacatctcgattccgaataaagggcaaaaaacaattctccatttttggacgtcatggtgcccgccctgcaaaaaggagcttccacagtttcaatcgttttatgatgcccatccatccgacagtgtaaagctggtaacggtgaatttagtgaattcggaacaaaatcagcaagtcgttgaagactttattaaagcaaacaagctgacgtttccgattgtccttgactcaaaaggggaattgatgaaggagtatcatatcatcacgatcccaacatcatttttgctgaatgaaaagggagaaattgaaaaaacaaaaattggcccgatgacagcggaacaactgaaggaatggacggaagaatagctgagagcatagactctcagcttttttcatatagagaagaagtgaataaacattaatgataattattatcaaaaagaaattaaaataattataattgaaattctcttcgtgcgtgctataataaaggaagacatcaagaaataactgacgataaagctgccttttgggcagcgattttgtttttataagagaaatgaagatgatttacgttctcaattagagaggagaattcgatatgaatgaacaagttatcgttcaacgcgacccgcatgagccattgaaaacagacaagagggaaaaaaactgggcacagcacgcggagcttattgcagcacttgtatcaggcgctcttattttggcaggctggctcttatccggatatcaggtattatccataatacttttcttgctggcttttgtgatcggcggatttgctaaagcgaaggaaggaatcgaagaaacactcgaatccaaaacgctgaatgtagaacttttaatgattttcgctgccattggttccgccttgatcggatactgggcagagggtgctattttaatatttattttttccttaagcggagctttagaaacatacacgatgaataaaagcagcagagatttaacgtctttaatgcagcttgagcctgaagaagcgacattgatggtcaatggtgaaaccaaaagagttccggtttcagacttgcaggccggtgatatgattgtgatcaaacctggagaacgcgtagcggcagacggtatcattgaatcgggctcgacaagtcttgacgagtcggctttaacaggtgaatcaatgcctgtagaaaaaaacacaggcgacactgtattcacaggaacggtgaatcgcaatggctccttgacagtccgtgtcacgaaagcaaatgaagattcgttattcagaaaaattatcaaactggttgaatcagcgcaaaatagtgtttcacccgcgcaggctttcatcgaacgatttgaaaatgcttatgtgaaaggtgtgctaattgcggtggcgctccttttattcgtcccgcactttgcgctgggctggagctggagtgaaaccttctaccgcgcaatggtgtttatggttgtcgcgtcaccttgtgcgcttgtcgcctctattatgccggcggcgctgtccctgatttcaaatggcgcccgcaacggtatgcttgtgaaaggaagcgtctttcttgaacagctgggctcagtgcaaatgatcgcctttgataaaaccggaactgtaacaaaaggccagcctgccgtagagacgatcagaatagcagaaggattcagtgaagcggaagttcttgaggctgtctatgccatcgaaacgcaatcaagccatccgctcgcccaagccataacggcgtacgctgaaagccgcggcgtgaatcagtccggctacatatctatagaagaaacctcagggtttggcgttatggcagaagtgtcgggtgcgaaatggaaggtcggtaaagcaggttttatcggcgaggaaatggcagcacaatttatgaaacaaacagcatcagatgtcattcaaagcggtcatacaattgtatttgtgaaaaaggatgatcaaatagcaggctgtatcgcactgaaggaccaaatcaggcctgaagcaaaagaggtcatggaagaactgaaccgacttgggattaaaacggccatgctgacaggagatcacgaagacacggctcaagcgattgccaaggaagccggcatgacaactgtcgtggcagaatgcctgcctgaccaaaaagtgaatgaaatcaaacggttaaaagaagaattcggaacgattgcaatggtgggtgacggaatcaatgatgcgccggcactcaaagcagcggatgtcggcattgcgatgggcggcggaacagatgtagcacttgagaccgctgatatggtcctcatgaaaaacgatttgaaaaagctcgtaaacatgtgccgcttgtctcggaaaatgaacaggatcatcaaacaaaatatcgtgttttctctagctgtaatctgcctgctgatttgtgcaaactttttgcaggcgatggaattgccatttggcgtgattggtcatgagggcagcacgattttagtcatactaaacggtttaagactcctaaaataaaaccagcagcctaatcaggctgctggctttttatgtatcaagctttcccttcatttttgtctttatcagatcttttcataactaggatgagagcgagggtgcagcaaaggaaacccgctgcacagcctatgatagagctgtaataataaaagcccaccatcttcatcccgataaaaggagcggaaattcccaaaaccgttaagagcataactgcttttcgtctgaaaaaattcatcagcaaacggaacaacccccctgcgattgaacgttactgtcagtatacaggaagaggagcaggaaataaaatgcattagaaaatgaaggcgtcgtgaaaggcaaacaccggtaaaacctgttacaatggaagacagaacaatgcattgcaaatggcagggaggaacaagaagtgaatagaatacaacgcgtctcttcatggctgaaggaagcggggcatactgccgcatttattcatacgaaagaaaatgttttttacttaaccggtttttacacagagccgcatgaaagattaatggggttatttatttttcaagaagaggagcctttctttgtttgtccaggaatggaagcaggacaggcccgcaacgcaggctggaatcatgaaatcattggctatgcggatcacgaaaatccgtgggagctgatagagaaggctttgaaaaagcgaaatatcagcatacatatgcttgcggtagaaaaggattcaatctcgctgtcacgtgcagaacagctgaagcatgcgacgggcggggctcaatttgtttcagcagaagaaacactcaatcaatttcgcctgattaaagatgacaatgagattcgtttgctgaaagaggcggcaaagcttgcagattacggtgttgaagtcggcacagccgctttgcgtgaaggcatcagtgaagtggaagtgctcgctcaaattgagtatgagctgaagaaaaaaggaattcagggcatgtctttctctacaatggttttattcggagaaaaatctggccagcctcatggaaatcctggtacagccacgttgaagaaaggtgattttgttttatttgatctcggtgttattcttgatggctattgctctgatattacaagaacgtttgcatacaaaaccatcaatccgaagcaggaggccatttacgagactgtgcttcaagcggaaaaagccgcgattgaggcaagcaaacccggtgtgagaatcggagatctggatttaactgcccgcggaatcattgaaaaagcgggatatggtgattattttcctcaccggcttgggcatggactcggaatttcagtccatgagtatccatcaatgagccaggccaacgatacactgctgcaggaaggcatggtctacacgatcgaaccggggatttatgtgccagagatcggcggcgtacgcattgaggatgacgttcacgtaacaaaggacggagcagttgctctgacccaatatccaaaggatttgatcatactgtaatagaaataaaaaaggactttgttctcgacatcgtccttttttatctgcattaaataaaaaaatcatcaaatgttcgaaagggtttaatttcatgtttttggttgagaggttttacagcaagacagctgccaccgagaacagtgagacataacccaattaaaatgaagaaacccatgtgatcttctcctttcagctaaaaacacaaaaagatatctggtacgtccatatcatattgtatgaaacgcattccagatcaaggggatttagaaagaagggaatctatggctaatattaaagacattgcagagaaagccggtgtctctgttacaacggtttcccgagtcataaacaatcatccatacgtcagtgaagacaaacgaaaaagagtgtttgaggcaatggaatcattggagtacacgagaaatattcacgctgtacatttgtcgaaaggattttcaaacatgattggtgttgtcttgccgacggttaatctgccatattttgcagagctgattgcaggaatagccgacgcagccgcggaatccggggttcacctctctttattccaaacaaactatgaagtacaaaaagaaatctttgcgctgtcccaattaaagcagcgccaggttgacggcctgattttttgctcaaaggcgcttgctgatgagaaactcatggaatgggagggcccgattttgctttgccagaattcagataatgcccgcttcccaaccatcagcattcctcaccaagaagcatttcggaacggcttggactatttaattgccaaagggcacaaaaaaatagccatctgtttggcaagaaaaaaaggcatgaacagccattttcgaatcaaagcctacaaagaggcattggaagagatcggcgaggcatttcgtgaagactgggtaattgagaaagcgattacaatcaatgatgggaaggcgctttttcataaatggaatacgtggaaggaaaagccgacggctatttttgttgccaatgaccaagtctcagcagggctttttcttgaagcaaagaaccagcgggtgtcagtaccggatgagcttgcaatcttaagcgttgataaccacgaaatcagccaagcgcttggaatcacaacgatcgatattcagacaagggaaatgggaaagcaggcatttgccatattggaaaaaagaattcaaggacagccgattgaaaggaaagttctggattaccgtctcatcgaaagatcgactgtttagtgaatgcattgaaaaaaggtttgacgtgcattctgttcgttatgtacgatatgaggtattgaatgacaaaggagctgaggatcgtgaatgggtccttcacagtgaaaaaggtactgaataataacgtattaattgcttctcatcataaatacagcgaagtcgttttaatcggaaaaggtattggtttcggaaaaaaacaagatgatgtcattgaagataaaggctacgataaaatgttcattttaaaagacgagaaggaacaaaagcagtttaaaaagctccttgactatgttgatgaaaagctcgttgatatttcaaacgatgtcatctatcacataagcaataggacgaatcactcattaaatgaacatattcacattgcgttgacagaccatatcgcatttgcgatcaaaaggcagcagcagggatttgatatgaaaaatccatttctaatggagactcagtcactatatcctgaggagtaccaaattgccaaagaagtcatagatatgatcaatgaaaaagcgggactctgccttccggaaggggagattggttttatcgctctgcatatccattcagcgttgacaaaccgtccgctgtccgaggtcaatcagcactctcagctcatggcgcagcttgtcgaggtgattgaagactcatttcaaatgaaagtaaataaggaaagtgtcaactatttgcggctgatcaggcatatcagatttacaatagaaagaattaaaaaagaagaaccgactaaagaaccagaaaaattaatgttgttattgaaaaatgaatatccgctatgctacaatacagcttggaaattgattaaaatcttgcagcaaacattgaagaaaccagttcatgaggcggaagcggtttatctgacgcttcatctgtaccgattaaccaataaaatttcataaattcagtttatccttataacgtgttactgattcgatcaggcatgagtgattgagggaaaaaaacgggaagttcattctcgttcttttgcgcacccaattttgctcatgcctttttgttgtgtaaaagggcaaatgtaaacggttaaactggaagacttacgcctgtgaattcgttgtcatgatttttagctgtaaggtcagactagtaaaaagaggaggtcaattcttatgtttaaagcattattcggcgttcttcaaaaaattgggcgtgcgcttatgcttccagttgcgatccttccggctgcgggtattttgcttgcgatcgggaatgcgatgcaaaataaggacatgattcaggtcctgcatttcttgagcaatgacaatgttcagcttgtagcaggtgtgatggaaagtgctgggcagattgttttcgataaccttccgcttcttttcgcagtaggtgtagccatcgggcttgccaatggtgatggagttgcagggattgcagcaattatcggttatcttgtaatgaatgtatccatgagtgcggttcttcttgcaaacggaaccattccttcggattcagttgaaagagccaagttctttacggaaaaccatcctgcatatgtaaacatgcttggtatacctaccttggcgacaggggtgttcggcggtattatcgtcggtgtgttagctgcattattgtttaacagattttacacaattgaactgccgcaataccttggtttctttgcgggtaaacgtttcgttccaattgttacgtcaatttctgcactgattctgggtcttattatgttagtgatctggcctccaatccagcatggattgaatgccttttcaacaggattagtggaagcgaatccaacccttgctgcatttatcttcggggtgattgaacgttcgcttatcccattcggattgcaccatattttctattcaccgttctggtatgaattcttcagctataagagtgcagcaggagaaatcatccgcggggatcagcgtatctttatggcgcagattaaagacggcgtacagttaacggcaggtacgttcatgacaggtaaatatccatttatgatgttcggtctgcctgctgcggcgcttgccatttatcatgaagcaaaaccgcaaaacaaaaaactcgttgcaggtattatgggttcagcggccttgacatctttcttaacggggatcacagagccattggaattttctttcttattcgttgctccagtcctgtttgcgattcactgtttgtttgcgggactttcattcatggtcatgcagctgttgaatgttaagattggtatgacattctccggcggtttaattgactacttcctattcggtattttaccaaaccggacggcatggtggcttgtcatccctgtcggcttagggttagcggtcatttactactttggattccgatttgccatccgcaaatttaatctgaaaacacctggacgcgaggatgctgcggaagaaacagcagcacctgggaaaacaggtgaagcaggagatcttccttatgagattctgcaggcaatgggtgaccaggaaaacatcaaacaccttgatgcttgtatcactcgtctgcgtgtgactgtaaacgatcagaaaaaggttgataaagaccgtctgaaacagcttggcgcttccggagtgctggaagtcggcaacaacattcaggctattttcggaccgcgttctgacgggttaaaaacacaaatgcaagacattattgcgggacgcaagcctagacctgagccgaaaacatctgctcaagaggaagtaggccagcaggttgaggaagtgattgcagaaccgctgcaaaatgaaatcggcgaggaagttttcgtttctccgattaccggggaaattcacccaattacggatgttcctgaccaagtcttctcagggaaaatgatgggtgacggttttgcgattctcccttctgaaggaattgtcgtatcaccggttcgcggaaaaattctcaatgtgttcccgacaaaacatgcgatcggcctgcaatccgacggcggaagagaaattttaatccactttggtattgataccgtcagcctgaagggcgaaggatttacgtctttcgtatcagaaggagaccgcgttgagcctggacaaaaacttcttgaagttgatctggatgcagtcaaaccgaatgtaccatctctcatgacaccgattgtatttacaaaccttgctgaaggagaaacagtcagcattaaagcaagcggttcagtcaacagagaacaagaagatattgtgaagattgaaaaataagggtgttagtacgccgtgcttgtcagatgacaagtacggttgtatgatataatattgtgaagtaataaagctttaagttaaaaggagaatgataaaaatggcacaaaaaacatttaaagtaactgcagattctggaatccatgctcgtcctgcgacagttcttgtacaaactgctagcaaatacgacgctgacgttaatttagaatataacggcaaaacagttaaccttaaatctattatgggtgttatgtctttaggtatcgctaaaggcgctgagatcacaatctctgcttccggagctgacgaaaacgatgctcttaacgctttagaagaaacaatgaaaagcgaaggactcggcgagtaatgcaagaattaaaagggattggtgcttcagccggcatcgcgattgcaaaagcgtaccggcttgaagagccagatttaacggttgaaaagaaaaacatctctgattctgaagcggaagtaagccgttttgatgaagcgattgcacgttcaaaagaagagctcgaaaaaatcaaagagcacgctttgaaagaactgggtcaggataaagctgatattttttctgctcaccttttagttctcagtgaccctgagcttctgaaccctgtgaaagaaaaaatcagcactgattcagtgaacgctgaattcgctttaaaagaaacgtcttctatgttcgttactatgtttgaatctatggacaacgaatatatgaaagagcgtgcggcagatatccgcgatgtaacaaaacgcgtaaccggccacctgcttggcgtcgaaattccaaacccaagcatgatctcagaagaggttattattgtagctgaagacttaacaccgtctgacacagctcaattaaaccgtgagttcgtaaaaggattcactactgatatcggcggacgcacatctcactctgccatcatggcacgttctcttgagattccagcagttgttggaacgaaagctgctacaggcacgatccaaaacggcgtgactgttatcgttgacggtatcaatggcgatgtcattattgacccatctgcggaaactgtaaaagagtatgaagaaaaacataatgcttatttggctcaaaaagctgagtgggcgaagcttgtcaatgaaccgactgtctcaaaagacggacatcatgtagagcttgcagcgaacatcggtactcctgatgatgtaaaaggtgttcttgaaaacggcggagaagcagttggcctttaccgtacagaattcctttacatgggaagagatcagctgcctacagaagatgagcagtttgatgcttacaaaacggttcttgagcgtatggaaggaaaatcagtcgtcgtgcggacacttgatatcggcggagacaaagagcttccttacctgcagcttcctaaagaaatgaacccgttcctgggatatagagcgattcgtctttgccttgaagagcaagaaatcttcagaacacagcttcgcgcgctgcttcgtgcaagtacatacggaaacttgaaaatcatgttccctatgattgcgacagttaacgaattcaaagaagcaaaagcgatccttcttgaagagaaagaaaagctcgtaaaagcgggacaggctgtatctgacgatattgaagtcggaatgatggttgagattccgtcaactgcagtcatcgctgatcagtttgctaaagaggttgatttcttcagtatcggaacaaacgatttgattcaatacacaatggcagctgaccgtatgaatgaacgtgtatcttacctgtatcagccatacaacccggcaatccttcgcttaattacactggtaattgaagcagcacacaaagaaggaaaatgggttggcatgtgcggagaaatggcaggagacgagattgcgattccgatccttctcggcttaggcttagatgagttctcaatgagcgcaacgtctatccttccggcaagaacacaaatcagcaaattgtctaaacaagaagctgagtcattcaaagagaaaatcttatctatgagcacgacagaagaagttgtcgcgttcgtaaaagaaacattcaagtaatgtacaaaaaccagacggcctccggcctgtctggtttttttcataagtaagggtatagaaggacacaataacatggctaggagggatagtatgtcaaaccaatttaacgcaggagatactgtttatgtgatctacagaaatccgcacgccgccaatgtagcccacataaaggaagccgaaattgtgcaccatccataccatgaaggcgagctttccctgtttatttatgaaacctatcatccattcgcagaggacgatgctgtgtttgcaagctatgaagaagctaaatcgctttacaaagaactgtttgatattgatccgtatgagtaacaaggaaatcattacaactcatatcctttccgcctagtgagaaaagtaacgttagtaaaggaaaaggatgtggcatcatgcagaacccatttgttccgcagcttgtgtatatagaaccgagggcgctggaatatccgctgggccaagaattacaagataaatttgagaatatgggtattgaaatcagagaaacgacatcccacaatcaggtgcgtaatatccctgggaaaaatcatcttcagcaatatcgcaatgcgaaatcaactttagttatcggtgtccggaaaacattaaagtttgattcatccaaaccctcggccgaatatgccattccgtttgcaacaggctgcatggggcattgtcattactgctacctgcaaacaaccatgggatcaaagccgtatatcagaacttatgtaaacgtcgaagagattttagatcaggcagataagtatatgaaggagcgcgcaccagagttcacaaggttcgaagcatcatgtacgtcagacattgtaggaattgatcatctgacacacacgctgaagcgcgccattgaacattttggccaaagtgatctcggaaagctccgatttgtaacgaaatttcatcatgtcgatcacctattagacgcaaagcataacgggaaaacgagattcagattcagtattaatgccgactatgtgattaaaaactttgagccgggaacttcacctcttgataagcggatagaagcggcagtaaaagttgcaaaagcaggctacccgctaggctttattgttgctccgatttatattcatgaaggctgggaagaaggatacagacatctgtttgaaaagctagatgctgctttgccgcaggacgttagacatgacattacgtttgaattaattcaacaccgttttacaaaaccggccaaacgagtgatagagaaaaattatccgaagacgaagctcgaattagatgaagaaaagcgccgttataaatggggccgttacgggatcggaaaatatatttatcagaaagatgaagagcatgcacttcgagaggcacttgaatcctatattgatacctttttccctaacgcaaaaattgaatatttcacttaaacgggctgttgtgatcaacagctcgcttttttataaaaaacatttttccattccatcaaaacgccgtaattcaatgattctttatcctccaaataattgctgactacacgaataggtgaacgcccgcaacggaggagaaaggacagcacagggtcgtttttcctgccttccatcacatcttcaacgtactgaacagcgctgatctcgtgtgcgtatttataatacaaaggaatgcggccgccgccgagaaggcgttccagtcttttatcaacagtcagctcatacatcgtattcatcagccattttccgattccaagctttcgataatgaggagaaacagaaatatccactacatataaagtatttccatgaggttcatgatttttaatcgatccgttgtcagttgcttgtgcccatgtatgatcaggagaatcaggctcaaattgtacaataagagcagtcatggaaccgataattctgccattgatgagcgcgcataaagcgccttccggaaaggttttgatatggctggcaagctggtcctctgaccacagcaattcctggggaaacggaggagggaaacattcttcttgaagagaaatcagcctctcgatgtcagtctcagtgtagtttctaatggtcagagcctcaaattttctgccgtcatgcacatacatttgttttagtatgatcatcactctccttatgttgtttcattataacgaagattgaattttcagtaaatatattccgattttcttataatttattttttgattattcatttttcaaacgaaagggccgatatagaaattaggaggggattggtttgtttaaaaaacttcacatgaagattgctgtttttgtttcgattatgttaatcatcacagttgttctcttaatgctgtcttcttatttgacgctaaaaccgatgattacagaggatgggaaaaatacaactcaaaacgtgacgcagtcacttgaacaaaatattgaattgcaattaaagagttatgccatttcgttatcaagattggctaatggggaattaacgcatacatttgtaacgaaaccaagtaaagaagcttctcggctgtttcacgatgacattaagcaaatcaaagacaacgatgattatgttgcgatggcttacataggcaccgcaaaaaaagaaatgtttacatatccaaaagcggatttcgctgaggattacgatccaacatcaagaccatggtataagcttgcagctgaaaccccggatcaagttgtttggacggaaccttataaagatgtcgtgacaggagacatgattgttactgcatcgaaagcgatcttagacaggcaaaaagtgataggggttgccagctatgacttgaaactctctgctatccagagtatggtcaataaacaaaaggtgccttacaaaggatttgcctttttagctgatgcgagcggcaatcttttagcccatccgtcaaatcaaggaaaaaatatatcaaaggatcaaacactgcaaaccatcgcatccgagaaaaaagggatacaagatgtgaatgggaaaatggttgtgtaccaaacgattggcgagacaggctggaaggtcggaacgcaatttgataccgatcaattaatgtggatttcagataaaatgaatcgggccaatctttggatatcattgattgcgcttatcataacaattattctcagctacttcctggccaaaacgataaccggtccgatacagcagctgatcgtaaaaacgaaagctgtttccgcaggcgatttaacagtgcgcgcggaatcaaaatctaaggatgaagtcggtattttaacaagagatttcaatctgatggttgaaaatatgaaggaaatggttgagcaagtgagactctcttcagggaaagtatctgacacctctgaacaactaacggctgtggctgccgaaactaatgaaacaagcggacaaattgcaaaagcgattgaagaagtagccgcaggggcatcggaacaggcttctgaagttgaaaccattaatgaaaaatcggaaagcctgtcaacgaaaatcaggcaaatcgctgaggaggcaggcggaattaaagaacgctcaaaatcgtccgaggatgcaagctataaaggacttgacgcgctcggccagctgctgatgaaatcaaacgaagccaatatggaaacgaaaaaggttgaaacgatgctgctggatttggaaaatcaaactaagaatattgaagaagtcgttacagcgatttcaaacatatctgatcaaaccaacttgcttgccttaaatgccagtattgaggcagccagagccggagaaagcgggcgcggttttgccgtcgtagccgatgaagtgcggaagttagctgagcaatcagccctttctacaaagcatatcagcgagactgtgaagcttatccagcttgagacaaaagaggcctctcacgcgatggttgaggcaagcagaatgaatgatgaacaaaacagtgcaattcacgaaactggagaggtattaaatacgataactgcagaaatgcagtcactggtacaaggtattgatcacatttacgcggaaattcaaagaatgagtgaagaacagcttgcgatttctgaagccattcaaagcatttcagccatatcacaggaatcagctgccgcagcagaggaagtgaacgcatcaaccgatgaacagcttgtcacccttgataaagtcaaacactcaacggaaacactaaaacatgcaagccaagagcttatgaacacaattgcaaaattcacattgtaatccaattacatccccaaacatcatttgttttggggattttttattttataagatgaatagatatggtagtctagaaaatgaaggaaaaatgataaattttaactaaaatctaaacgaaacatctgggaggaatgaccttgaaaaaaacaattggttttatcggtcttggagtaatgggaaaaagcatggcatcacatattctcaatgacggccatcctgtattggtgtacacccggacaaaagaaaaagcagaaagcatacttcaaaaaggcgcgatctggaaagatacggtcaaagatctttcgaaagaagcggatgttatcatcacaatggtcggctatcccagtgatgttgaagaagtgtatttcggaagcaatggaattattgaaaacgcaaaagaaggtgcatatcttattgatatgacgacatctaagccttcgcttgcgaagaagattgctgaagcggccaaagaaaaagcattgttcgctttagacgctcctgtttccggtggagacatcggtgcacaaaacggaacactcgcgattatggtcggtggagaaaaagaagcttttgaagcctgcatgccgattttctctttaatgggagagaatattcagtatcaaggaccggctggaagcggacagcataccaagatgtgcaatcagattgcaattgcagccggtatgatcggtgttgctgaagcgatggcttatgcccaaaaatcaggcctagagccggaaaatgttctgaaaagcatcacaacgggcgcagccggaagctggtcattgtcaaatcttgctccccgtatgctgcaaggcaactttgaaccgggattttatgtgaagcattttattaaggatatgggaattgcactagaggaagcagaattaatgggggaagaaatgccaggcttgtcgctcgcaaaatctttatatgacaagctagctgctcaaggtgaagaaaacagcggaacacagagtatatataagctttgggtgaaataaaaaaagattgcctgtacgaaacaggcaatctttttttattattttccgatgaattgttgtgtccagatgcttccagactcaacgtaaccaacaccgatgtgagtaaagttagggtttagaatgttttttctgtgtccttcactgttcatccaagcttttactacttcttctggtgtcttttggcccttcgcaatgttttcacctgctgttttgtagctgattccgaaagatttcatcatatcaaacggtgagccgtatgttgggctttggtgatcaaagtagtttttgtctttcatatcctgagattttgcgcgtgcagatttgcttaacgtttcatcaatttgaagcggttttaagccttgtttttgtctttctgcatttgtaagttcaacaacttttttctcatatgcacttacagatgaaggtgcagacgttgttgtgtttgttttttcagcagttgcgggtgctttagaagcagtgttttgatcagcagctgctttttcagtagtcttttgtgcaggttttgccgtttctgtcttttgaacatcctgaactttcacgttagattgcttcgcatgtttttgaagaagctgcttcatctctttttcgtttgcagcgtttaacgttttgatatttgtgttaatatgcagttttttcactgcatcgttaagtgacatgttttgtactgtgttccccgtttttactgtaaccacaggctggcaggagagttctttcgctgatgcttgctgtacgcccccgaatgtgaataatccaaccgcagcggcagcagataaaataaatgctttcttcattagttcgtaacctcctagagttgtttgtttctacagaaaaatcataacatagcttttttgtcataaagattccagcactttcctttgacaaatagagattgtcattttcgtaaagtaaatccgttgaatcactaagaataagggaatcagcggtatatatgattttatcgtaccgttacatagcttcctttttttgaaccgttagttatattttaatgtgtttttatattgacagctttttttactccttttcgctgtaacaactattacaaaggtgttacaattaatctcagtatatgtaaatatattgaatgatttgagaggggtaaccagaagtgactgaaataggacgtgaaccaaagaaaaagagcaaaggaaacagagcaatcagaatgaacctttttttcctagctgtctttgttctattcactgcattaatttttaagctcggggttgttcaaattgttgaaggcgaacagcatgaagaagacgctgagaaatcaaatgcaaaaacagcttactatcctgcgcctcgcgggaagatgtacgacagaaaccagaaagttgctgtcgacaaccagagcgttccagaaattgtgtatgtatcaacatctagcacaaaaacagaagataaaatcaaaacagcgaagcggcttgcttctttcattcatattgataccgaatttttgaaggaaagggatcttcgtgattactggatcgcagctcatccgaaaaaagccgccgctctgcttaaggaatcagaaagcaatctgaaaggagaccaggcttacaagcttcaaatagagcgtgttccggatcaagaattaaaggctattcagcaagatgacgaagaaatggaaactgctgcgatatatacaaggttttcaagcggaaatgcttacgaacctcaaatcgtaaaggcaatgaatccaaataagagcaatagcaatggaaaaaacggagcgctgcttgatgagaagaaaaactcctcgcaaagaccaaaaaatgacttaacatatgatgaaatttccattgtttctgagcatttagaagaacttccgggaatcgatatcgtaaacgattggacacgaaaatatccttatgacaaaaccctttattctgttttcgggggcgtcacgacacctgatcagggcctgctgagcgaccggaaagatttctacttaacaagaggctatgcgaataatgacagggtgggaaaaagttatttagagtatcaatatgaagaatatttaaattcgcataaagaaaaagtggaatacgtagaagataataaaggaaatgtcgtcagccaaaaaaccattgataagggcagcaggggatacgatcttcagctttcttttgacatggagcttcaggcaaaggtagaaaagatcattgaagaagaagtaagaaacagccgtgcacgcggaaattacatgcttgacagagcctttgccgtaatgatggacccgaataacggcgatattttatcaatggcagggaaaaagatagatttaaaaaccaacaaaattgaagattatgcgataggggcatttaccacccaatatgaaatgggatcagcagtaaagggggccaccgtgctagccggctatcaggacgggatcccgcattataaatattatatcgatgctccaatgcttttaggaacgaatcttataaaaaaatcttatactaatatgggaaccatcaatgaattaaccgcattgcaaaaaagttcaaacgtatatatgttcaatgttgccatgcatattgcaggcgtaacatacaagccgcatggatctctcccggctgatcagaacgatctactgaaaatgagaaactattacagccagtttggtctgggagtaaagacaggtattgatctcccgcaggaatcagccggaatgcaaaccacacctaaaactgtaggaggattaattttagacttagcaattggccaatacgatacatacacaccgcttcaaatggctcaatacatctcagtaatcgccaatggtggctatcgtgttcagcctagaatcgtcacaagtattcataagccaggaaaaaaagaccagctgggtaaggcgattgaacataggaaacctaaagtactcaataagattaataattcagagagcgatttgaaacaagtacaaacaggcatgaaattagtcacttcttcagggacagcaaaaaatacgtttacagaagatgtatcagggaaaacgggaacagcggaaacattttactacggcacgaatcgcaactggtgggggaaaaaaacatacaatctgacttttgtcggctattacccgtcgaaaaaaccaaaagtggcctttagtgttgttgttccatcagtagatgatgatgataagatcaataaaattattgccaaaagagctatccacgcctacgcagagctcgaaaaaaaacacagtaaaaaataaaaaacagggtgcacaactaaaagattgtgtgccctttcttttattcaaaaattgacgttcaccataagaatagaaggagaatactcattttctagcgaatcatactaggtaaaagtcaatctgtatatgtcgaaacacgatgatcatgcaaaggagggattctgtggaacaggatacgcagcatgttaaaccacttcaaacaaaaaccgatattcatgcagtcttggcctctaatggacgcatcatttatatatctgccaactccaaactgcatttgggctatctccaaggagagatgatcggatcattcctcaaaacgtttctgcatgaggaagaccaatttttggttgaaagctatttttataatgaacatcatctgatgccgtgcacctttcgttttattaaaaaagatcatacgattgtgtgggtggaggctgcggtagaaattgttacgacaagagctgagcggacagaacgggaaatcattttgaaaatgaaggttcttgaagaagaaacaggccatcaatccctaaactgcgaaaaacatgaaatcgaacctgcaagcccggaatcgactacatatataacggatgattatgaacggttggttgaaaatctcccgagtccgctatgcatcagtgtcaaaggcaagatcgtctatgtaaacagcgcgatgctttcaatgctgggagccaaaagcaaggatgctattattggtaaatcgtcctatgaatttattgaagaagaatatcatgatatcgtgaaaaacaggattatacgaatgcaaaaaggaatggaagtcggaatgattgaacagacgtggaaaaggcttgatggcacacctgttcatttagaagtgaaagcatccccgaccgtctacaaaaaccagcaggctgagctgctgctgctgatcgatatctcttcaaggaaaaaattccaaaccatcctgcaaaaaagccgtgaacgatatcagctgctgattcaaaattccattgataccattgcggtgattcacaatggaaaatgggtatttatgaatgaatcgggaatttccctgtttgaagcggctacatatgaggatttaattggcaaaaacatatacgatcagctgcatccttgcgatcacgaggatgtaaaagagagaatccaaaacattgccgagcaaaaaacagaatctgaaattgtcaagcaatcctggttcacctttcagaacagggtcatctatacggagatggtctgcattccgacgaccttttttggtgaagcggccgtccaggtcattcttcgggacatctcagagagaaaacaaacagaagaattgatgctgaaatcggaaaaattatcaatcgcagggcagctcgcggcgggaatcgcccatgagatccgcaaccctcttacagcgatcaaaggatttttacagctgatgaaaccgacaatggaaggcaacgaacattactttgatattgtgttttctgaactcagccgtatcgaattaatactcagtgaactgctcatgctggcgaaacctcagcaaaatgctgtcaaagaatatttgaacttgaaaaaattaattggtgaggtttcagccctgttagaaacgcaggcgaatttaaatggcatttttatcagaacaagttatgaaaaagacagcatttatataaacggggatcaaaaccaattaaagcaggtattcattaatttaatcaaaaatgcagttgaatcaatgcctgatgggggaacagtagacattatcataaccgaagatgagcattctgttcatgttactgtcaaagacgaaggggaaggtatacctgaaaaggtactaaaccggattggagagccatttttaacaacaaaagaaaaaggtacggggcttggattaatggtgacatttaatatcattgaaaaccatcagggagttatacatgtggacagccatcctgaaaaaggcacagcgtttaaaatttcatttccaaaaaaataaaaacaacggcttaaacgccgttgtttatcgtctgcattgcttcacgtttttttaatacaaataattctaaacggtctaggccttctctcagcgtgtccattgagcatgcaaaagacagccttacatatccttcaccatatgttgagaacgagctgcccggcacgagtgccacgccagcgtcttccaaaagagccatactaaaatcaaatgaagtcattccaaatgatttaatagaagggaagatataaaacgcaccggacggtttaactacgtcaagtcccatggaaacaagacggtcataaacatagtccagacgttttttgtattgttctctcataatcaatgcatcgtcaaagccgtttgtgacagcttcaagcgcggctttttgagaaatggatgaggcgcacgacacattgtattgatgaacctttaaaatgtgctttgcaatgtctttcggtgcaaataaaaatccaattctccaaccggtcatgctgtgtgattttgacaacccgttaatgacaatcgtttgatcccgcaaataggttgcgatggagtaatgcggtctgtcatatgttaattcactgtatatttcatcagacaatacgaagacatttctgccttttaagagagctgcgatgcttttcagttcttcttcagataaagtcacgccggtagggtttgacggataaggaagcacgacacacttggtgttgggtgtcagagcatcttcaatcagccgggcggtaagcttaaagccgtgtgacgtagtatcaacaatgacaggcttggccccgcacaaattgataataggttcatagcccggataaataggccctggcataatgacttcatcaccgggagataaaatcgtccggaatgcagcatcaatggcttggcttgcgcctgttgtgatgataatttcagattcagcatcatagttgaaatccgcttttttcttcatataaagctgcacagcttgtctcagctccaggtagccggcattcggagtatatgacgtcacgttttcatcaatggctttttttgcggcagctttcacatgatgcggtgtgaaaaaatcaggctggccgattgtaagtgaaatgacgtcttcgtgttgggctacaagattcgagaatttgcgtattcctgaaatttcgatctctcttgctttcggattcagcaaatgttccataattcatcaccttaacaaatataatgagtttatcctattttaccactagctgatcatttgtcacctttttaactgatatatttcgattgtatgcgccttttttctaaacatacctttcttttcagaaaaaaagaagacaaccagcgatttgattgtctttattgtatcatgttctattattgtttatatgtgccaatttcattaatagccataatcaaaatgaaggtcttcgtgccaaatcagatacggaggatgctcttcttgaaggtcagctgattctttcttcatattcaggtaagtttcttcactgatatcctctaaaacagtcatttcgttttctttaaatattactaaggtacccattatttacacccttctttggaaaaatccttgactattttatcactgttagttggaaagtcaatggttattaggaaaaaagtttcttttttgaggaacgcggcttgttgccttcggaattcgattttgaagagctgccattcactttttacaaattacgccgatatatacagtacaatactgaatgcgaatagcgagggattgaattgtcgttacaacaatacgaaattttattggattctggtacaaatgaattagaaattgtgaagtttggcgtgggtgaaaatgctttcggaattaacgtcatgaaggtaagagaaattattcagcctgtcgaggtgacatcagtgcctcactcccatcagcatgtagaaggaatgattaaactcagaggagaaatcctccctgtgatcagtctcttctcattttttggagtagagcctgaaggatcaaaagatgagaaatatatcgtgactgaatttaataaacggaaaattgtttttcatgtcggctctgtttctcaaattcacagagtatcctgggaagcgattgaaaagccgacatcgttaaatcaaggaatggagcggcaccttaccggtattattaagctcgaagacctgatgatctttttgcctgactatgaaaaaattatttatgacattgaatcagattcaggtgttgacacgtataatatgcataccgagggcttcgatgaaagaagaactgataaaaagcttatcattgtagaggactcaccgcttttgatgcgcctcttgcaggatgaattaaaagaagcagggtacaacaatatcgcttcgtttgaaaatggaaaagaggcatatgaatacattatgaaccttgctgaaaacgaaactgatttatcaaaacagattgatatgatcatcactgatattgaaatgccaaaaatggacggacacaggctcacaaagctgctgaaggaaaatccgaaaagctcagatgtgccggttatgattttctcatcgttaattacggatgatctgcgtcaccgcggcgaagttgtaggcgcagatgagcaaatcagcaagcctgagatcagtgatttgattaaaaaagtggatacgtatgttattgaataaataaaaacagccgttgccagaaagaggcacggctgtttttattttaaaagtaactctcgccaagttttttaaagaccggtttatggtaagctggctgctggcgatttggcactagcggcttttctttcatgccgacatattcttgcaataggtgtttcgcttttgttaaagacatttgagctttaggatttcgatacgattgattaagtgtacctaaatgcggaagatgttcgaagtcttctttagttggaggcatgtgaaaatagtagtctccgattgagataagcacgtccgattgctgttggctgaaccttggattttttgaaaaatgaagccctattttctttcctttaccttctttgacaagcttttgcaaagcccgttttttcagcagatataggtatttagggttgggggcggtttttgcatggcggttcacagtgtaaactgcttttgaaagattttctacggttggctgcagatctttcgtatatgcatggtcgtccattatttctctcctttgctcttatcaatttctatatgtttagattatacttttttaaagttgaaatgcaaatattgaatgtaaaaatgcgcttttttctaagaaaaaaagcgcatttttaacctgcattatacagatcttgccttctttttcggctgttcttgaaatgcttcctgaacattcacttccacagcctgagcactgtattttggcagtgcaataaaataaaaaataaaaacgagcaggataataacacccatgccgtaataaagataatcaatgtttgaaacaaacttagggaataacagcgcgactaagccgagtgtcaaagattgtgcaaacatcataaaagggtcctgcatgccgcttacacgtcccatcagttttggatgaacaatttttggcatccaccctccgattgcaatgttgatcggtccgatacacattcccagtgcaaaagctgccgcgtaatacacccataaaatattggtgtagccgaggacgaagatcagcaaacctgcaatgaaaatcggtatcgacattaaaaagtgcggcttcacttttttagagatgagcgtgccgattacgcttcctgccagaagcccaaacccgagtgcgatcgtaaatacagacgtatgccactcataacggtcaggcgccaatccatatttcattgtaaacatcggcaatacggcgaatcctccattgacaaatccaaaaatgaagaagccaaaaataagagatgccagcaatttgttttttaaaatatagaggatgccttctctaaagtcatttattgaatccttaacagaagtctttctccagctgaatgcaccgtttggctgtcgggcttcttttggaatccggcagctgcggatcagcagcccggaaatgataaagctgacaaaatcaagaataatggcgccttcaataccgattgtgttgtacataaacgcgcctatgccgactccaaacaccataaaaatgctaaaaagcatctgattaagccctgccgctttcgcataatgctccttcggcagaatggcttgtaccaaactgttttctgccggaaagaaaaactttgttacagcgcttctgataaataagatacaaaaaacaagaggaatattgccggtaaataaagtgaaaaaaagcacgacagtcaggcctgctctgatccaatcacaattttctgccaccttttttctatcaaaccggtccgcgacgactcccacgatcagaaatacaaatatggtcggaagagaatacatcagctccgccaaggtcgtatatgaaggctggctgctgaatcggtccagcaaaaaaaaagcaaaggccatgttgcctactgtcgtgcccatttgagaagcgagtgctgcgaaaaatagacgaacaaaattacgatttttaaatatatccataaaaacgctccttaccctaaaggtcccactttatcatattataaaccgcctgtttttgaaacaaataagaaaacattaccggttaatcgtgactctcgttccgtttggcacaattgaagcaagttcgatcacgtctttgttatgcatgcgaatgcagcctttagaaacagccttaccaatcgaagcgggattattcgtcccatgtattccgtagtgctgctttgaaaggctcagccaataagcgccaaatgggccgccgggattgcgctggcggttaataatgtaaaactcgccagtaggcgtttgcgttagtattttaccaacggcgatgggataggttttcattacccgattatttagggacagcgtaagggtcttcgctccgattgagactgcgatatgatacggaattgtataagggtccggcagtccggggatgactatggactgtcccgcggtgagccctgcctgcagtgacggattagcctggagtaatgcagccgtgctgattctgaaatcagccgcgatgctgttcagtgtatcaccttgcttcacctggtacgtaagcagtttcctcatcctccttttttacttataagtattgatgaggagcccatcctgctacattaatttgtgctttttaaggtgaagacagtgatttcaggcttggcaagaaaccgcaaaggcagcctggtcatcccgaggcctcggtttacgtaaatatgagtgctgcccgtttgatacattccctctgtgtagacttttccatatggaggcgtaataatcggtccgtaaaaaggcagctgaatctggccgccgtgtgtatggccggaaagctgaaggttcacgggataatctgttgttttcaaggctgcatcaggttcatggacgagaagaatggaaaaaagtctgtcgctcagccttgaaagggtgccttcataatctgggtttcccagcattaagtcatcaagcgaagcaatctcgattttgctgccatctgcgagtgacaatgtttgatagccattgcgatataccgtgaaacctccggccgtcatcaggcttttgtaaacggcagttccatagcctccgtgatcatgattgccgtaaatacaaagcttgccgaagggagcattaagctttctcaataatggaatgactgcctggtggtgctggtacgtatcaggattatcaataatatcacctgtaaaaacaatgagatcaggtttagattcattaattgtaagaatgacagtttttaaatcttcgagagtaaagtaatcactcaagtgtgcatcgctgaactgcacgattttaaaaccgtcaaatccgtgcgggatgagagagctttttattgtgtgttcggttgtctcgatcatatgcggctcgagatacctggcatagccatatcccccgccggccgttaaagccccggcagcaagagcgccgaacattccttttagaaattgtcttctggacatctttttcatttcaaaccaacctttaatagagtttttctattatatcatctgtatctgataaaaatctcatatgagcatgtgctgacagaggcagggatataatgatagaatattattgaatgaataatcattcacaattggagggataaacatggaaaaaaaggcggtaattattaccggcgggtcaagcggcatgggaaaagcgatggcaaaaaaacaggctgaattagggtggcacgttatggtgacagggaggaaccatgaggcacttgaggaaacaaaaaaagaaattcagacctttgagggacaggtcgcttgttttcaaatggatgtccgttccgattccgccgcttcagacatgattaaagaagcggtaaaagcctttggccggcttgacgcgctgattaacaacgcggccggaaactttatttgtccggcagaaaagctgacgcccaatggatggaaagccgttattgagattgttttaaacggcacatttttttgcagccaagcagcggcaaggcattggattgaccagaagcagcagggtgtcattttaaatatggcagccacgtacgcttggggagcgggagcgggggtcgttcattccgctgcagccaaagcgggggtattgtcattgacaagaacgctggccgttgaatgggggagcaaatacggcattcgtacaaacgcgatagcccccggaccgattgaacgaacaggcggtgcggagaagctatttgaatcggaaaaagcgatggcccgcacgatgaacagtgtgccgctcggccgattgggcacaccggaggaaatcgccgctttggcagcgtttttgctttctgatgaagcatcctatataaacggggattgtatcacaatggacggggggcaatggctgaatccttatccgttttaatctgaatatttataagtgaatatttaagttattaagaacttttatgttcgaatgtaatacctccacaattaaccttcttcctatccaatttgataacacatagagctttatttgtttatgaggtgttgtgtcatacgtaagccacctaatatatgaaaggtatattttaaaaggggagacgaaatatgaagaacttagatttcaaataaaacattcatataattacttcgttaactaaaaagagaaattataagaatgaaaggtttcaaggttacatcagattgggaggaaggtaatataatggacgagatggtattattaactcaggaatggctcaatgaaacgtacaaaggaaaaagtggctacaattccattgaggaaaatgggaaaactggctggaaaacaatgtatgcattaactagagcattacaactagaattgggaattacacagacttccgacagttttggtcctacaactttaagaaagcttaaagaattaggcccgatttctacgtcaactaattcaaaaaaaaatattgtgaaaattattcaaggtgctctttattgtaaaggttatggtccaggtggattaacgggtacatttggtcagggaacgaaagaggcgatagcagaaatgcaattgcatatggggctttctaaaacagacggtgtagtaacgcctaaggtgtttaaagctttattaaacatggactcttatatccttttaaatggggcgtcagagaaagttcgttcaatacagcaatggctaaataataaatattacaatagagagaatttctactttatgccctgtgatggcctgtattcaagggatactcaaaagtctcttgtttatgcaatacagtacgaggaagggttaagtgatagtatagctaatgggaattttggaccaactactcaaagattgattcctgtattaagaattggagaaacagatgaaaaaaacagttttattcatttatttcaagctgctctaatctttaatggctacaatgttccttttgatggagtatactctgaatctgtaagatcaaaagtaaaggcttttcagtcttttgcaaaattacaacagagtggtactgccgactttcaaacatgggcttcacttctagtaagtactggagaccccaatcgaaaaggagttgcttgtgactcaattactcaaattacatcggacagggcggagtcccttaagagggcaggttataagattgtagggcggtatctaacaaatgcgccggggagtacactaaataaaaaaatacaaccaggtgaattagaaactatcttaaaatcaggtttaaatgtttttccgatttatcaaacctatgggggagcaacaaattattttaataaagaacaaggaaagaaagatgcgtttgctgcttataaagcagcaaaagaatacgggtttaaaaataacactgtaatatactttgcagtagattatgatgcatatggtaacgatttaaacaacaatattattccacacttcgaaggtataaatgaaataatgaacggttttttaggttcaacttacaaaattggtatttatgcccctaggaatgtatgtactatagtttctaaaaaaggtttagcatttgcaagttttgtaagtggtatgtctactggctttagcggaaacttaggatatcctttgccttacaattgggcgtttgaccaaatttcaacaattactgttggaaatggttctggaatgattgaaattgataatgatatttgttcaggtttggataatggagttaataccataaatatagtgccttcagagaataagaagttttttgatcaaattgatgttttatatgaaactgctgaaaaatatgctcaaatgcaaagcgacttaaataatggggtaaaaaaaacacaattagctaatgagttggttgcccagtatttaagaaaggatgactacaaagggtggaagtgggtccctaccgcaggccagattgatcctatttatcgtgaatgggcagtaaagcgctaggggaagacctagtaaatggaattgttgatcctatatcaaaaactgtcataggaacgcagcatcttatggcaacttataatgccattatttatagtggtggttactctcaaacactacgagattttgctggttggactggagatctattaacaacaatacaggacatgaaattacacgctcaagaatttaattcgccttatgatgcggctatgaaaataataggtaatatgtatcaatttagcctagatgatttatttagtgatgtagatgcaattaatctagcgaataaaacatcagttggtgctaatgcacaacctctaaatatcgcaattagagattattatagtaataatgactgtatgaataggttcactcaatttgtaaataatagatttgatggttcgttagacaaaattttctctgaagcagagtattatttaaatacaaaccttgacccagttgttgttccaattaggttagcctttaaacgtgcttttgatgttgaggattatagtgaagagattggaaaaataacagcacaagcatttagagatgttatcgagaaaaaaatgatatctgaataaactgcaaaacaagcgaacgttaaaactggtcgttcgcttgttttattttctatttaaatttatgatataatttttaaagattaaggagtgattcattgaagaaattgttaaaaaagttagttgtattatttttaagcagtttagttatcatctttaatgtttggtactttattatttgtgctttttccccagagtattatcaaaatacaaatcttacttctaatgaaataataagatttgaaaaactataccacatagattttcctgatgaaacaaaatttattaaagctagagagtatttggctgggcccggaggagatacgtcagctgtattatatgtgtctctgccaaccaagcgggtagaaaaagttttatctgattacacgtatatgaaaataaactatactgacaatgtcggttcaatgtatggagttgacgtttcaaagagtgtcgccggtttaacaactcttacatttggcacttacgataaaaaaggaactttctataatatgaaacatgatgatgattggatgtataaaggcactgactggaatctttacttttggacagctgctagttataatgctgttatttttgtatttgttttggttattgtgaaacaaatgaataaaattcttaattaaccagtatgtagattgataatctcaaaaaaattttcctcttcttttaacatactccatacgacctacttttccatactatgatttttttgaaatttgtggtgtagttataattgtgcgtataatcagacaaagatagagaagcaggtgataacatgttggatccacttgatattttaacgaacattgatgatgtccttccatattaccaggcgatttttagtgccgaggagcagaaggttgtcggatatgaggtgcttggacgaattttggcagattcagaaatccaaagtctcgggcccttctttttagatgcggggatacccgaagaatataaattagaggttgataacagaattatccgccaggctcttgaccgctttttagaggcggattctgatctgctgatttttatgaatcaggatgccaatctgctgatgctggatcatggtgaaagctttctggagcttctgaaagaatatgaagcgaagggaatcgaactccaccgttttgtgcttgaaattacagagcacaattttgaaggggatattgagcagctctaccatatgcttgcatactatcgtacatacggaattaaaatcgcagttgacaacatcggaaaagaaagcagcaacttggacagaatcgcgctgctctcaccagatctgttaaaaatcgatttgcaggcgctgaaagtgtcacagccgtcaccgtcatatgagcatgtgctgtacagcatatctttattagcaagaaaaatcggtgcggcgctgctgtatgaagacattgaggcgaacttccagcttcagtacgcctggagaaacggaggccgctattttcagggctattacttagtgtctccatctgaaacgtttctagagagagatgtattgaaacaaagacttaaaactgaatttcaccaatttatcacacatgagaaaaagaaactggagaccgtctatgagcactctgaacagttttacaaacgagtgcatcaggctgtgacctctttgagaaaaaacaatctgtcttctgatgatgactttattaaaaagctggcggaagagctgacagattgcagcttcaggatttacatgtgtgatgaagaaggcgatcagctgacgggaaatgtgtttaagcaagatggagaatggatttatcagccggaatatgcggaaaagaactggagctggcgcccttattttctggagaacattatgagaatgagaaatctcagaaaaggttttttcagtgatctgtacagtgatttggaaacaggtgaaatgatcagaacgttttcatatccgatggatgatcagatgtatttatttatagacttgccttattcttatttatatgagcaggacggactgatttaacggctgaaaggccgttttttttatgaaatgaaaaaaatatcaaaaaacgattgacattgatactgagaatcattatcatttaattatagagagaagctactctctgttccccaacccctctatcagatcaagatccgaaaaaacttggcgctacccccgccaagttttttatttgtcaaagcataggacaatccaatgaaacaataaacctaactagtggtaaacgtttaacacggggagaaacattgagtgccgaacacccctgacactgctgcacgggtgaggaggaaaattcgttctgaaatgattatttcagttccgttgtttacctctatccagcatgactcccattgattatggccacgcgggacttcaccataaaattcaaaagaaggttttgacaaagttgcaaaaaggcattcttaatgctgccaaagattcgaaaaaaattataattatgtgcatgacattcaaaaaaagcctcaaactaaagaaaaatagtttttttcactttttttctttgcttaaattcagcagtgaaaatgccatcctgtccgactttatggtatgatgctcaatagaacttgtattataataaatacttgttgatttgaagttgctttttgaaaggagtctttttttagaatgtcacaattaatgggtatcatcacacggctgcaaagtctgcaagaaacagcggaagcggctaacgagccaatgcagcgttatttcgaagtgaatggtgagaaaatatgcagtgttaaatatttcgaaaaaaatcaaacgtttgaactgacggttttccaaaagggtgaaaaacctaacacatatccgtttgataatatcgacatggtttccatcgaaatctttgaacttcttcagtaagattcctgaaatagggggaacaagcttccgcctttgcaaaagtaatcgaaataaacggtaaggaacatacttgtttcatggttgtaaatccttgaaaaggagtgtcgtgatggctgattcttttctgttttataatctttcagaagcacagatgacctttcaagatgtgatggaacggcttaaagcctttgttcaaaaggacccccgttcttcttatgtgttatcgatcggaaccgattcacaggtttaccgcgattacacaaagtttattaccgcattgcatttgcatcgtacaggcaagggagcttggggctgcttgaaaaatcatacagtcgacagacccatacatagccttcgggagaagatttcgttagaaacggcgtacagccaagaaacggccgctcatattcttgatggacacttaatggatattaccgatctgctcctgccctttaccggtgagggggcggatcttacctttgaagttcacttggatattgggaaaaaagggcttacaaaagatctgatccaagaaatgactggacgtattacctccatggggattgaggccaaaataaagccggattcatacactgccttcagctatgcaaatcgtttcacaaaataatttggctgaaaaagccaaggtaaatgtcgaattatgcggttgacgtttgttatctgattacttattctagcggtagagctgaaagtaagttgtcttgctttcagaggtattcagtataaaacagggggcctgattgcgaatgagtcttatcggtgaacgatttacagaagaagaacaaaaacttctgctgaatatcctgatcaaccatgagtatgccatcgagctattaagcagtgagatcaacgatatagagacagggaccaaaaacgttgacggaaccacctacaaaaaacttgtaacgctatacgaccgatttcgatttgaaaattaatgggacaccctataattgatactccacaaagagtatcttttttattgaaaggaaacttttcgacaaatactgataaagtttatattattgcaatatagggaatgtattgatgatgaaaatgaaaaggggtcgaaaacatgataagcttacaatcagatcaacttcttgaggcaacagtcggacaatttatgattgaggcggacaaagtagcgcacgtgcaagtcggaaataaccttgagcatgcattattagtattgacaaaaaccggatacacagccatcccggttctggatccttcctaccgtttacatggcttaatcgggacaaatatgatcatgaacagtatttttggacttgagcgaattgagtttgaaaagcttgaccaaatcactgttgaggaagtcatgctgaccgacattccgcgccttcatatcaatgatccgattatgaagggattcggcatggtcattaataacggatttgtctgtgttgaaaatgacgagcaggtatttgaagggatttttacgagaagagtcgttttaaaggaattgaataagcatatacgctcattgaataagtaggctgtacggtcctatttttattatataggcagagtgaaaaaagaaagcgcatacataatttaaacgagaatagggcttgaataagaaactaagattttattagaatgggagataagaaaaacttattgataacaaaaaggaggacgacatgcagcttcaagagcttcatatgctcgtagttttagctgaggaattaaatatgagaaaggcggcagaacggctttttgtatctcagccggctttatctcagcgcttacaaaccattgaaaaggcgtggggaacaaaaatctttttaagatctcaaaaaggattaacggtaacgcccgccggtgagaaaatcattcagtttgcgaatgatgtgacattagagcaggaaagaataagagaaaatattgacgagcttgaaggtgaaattcacggcacattgaagcttgccgtcgcctccataatcggtcagcattggctccctaaagtcctgaagacgtatgtggaaaagtatccgaatgcaaagatctcgctcataaccgggtggagcagcgaaatgctgaaaagcttgtatgaggatcaggttcatatcggcattataagaggcaaccctgagtggaaggggcgcaaagattacttaatgacagatcatctgtatttagtggatactgaaatttcctgcatcgaagatattgcccatacagaacgtccgtttatccagtttaaaagtgacagcacttattttcaggaaattcagcactggtggcatcaaaaatttaaaacgtcgccgaaacagacgatattggttgatcagattgaaacgtgcaaacagatggcgctgcacggaatcggttatgccattttgccgtctgttacccttcaaaatgaagataaagtgaataaaatgcctcttttagacatgaaagggcatccgatcggtcgggatacatggttattaggttatgagcctgcctttgaactgaaacaagttcaagcttttgtacaagtgataaaggatatgctggatcaggaaaatccattttaaagacagcgaggtgctgtcttttttttatttatctgttgacaatgaaaatcattatcatttaaagtgatacatatgatattgaaaatcattatcaactaatggggtgataacatggctaaagccttgattacatatgccagcatgtcaggaaatacagaagacattgccttcataataaaagatacgcttcaggaatatgagttggatatcgattgtgtcgagataaatgatatggatgcgtcttgtttaacctcctatgattatgtactgattggcacctatacatggggggacggcgatttgccctacgaagcggaggattttttcgaagaggtcaaacagattcagcttaatggtttaaaaacagcctgcttcgggtctggcgattattcttatccaaagttttgcgaagcggtgaatttgttcaatgtcatgctgcaagaggcgggagctgctgtttaccaggaaacactaaaaattgaattagcgcctgaaacagatgaagatgtggaaagctgccgagcgtttgcgagaggttttcttgcatgggcagattatatgaacaaggaaaaaatccatgtttcataaaggggcaaccgctgttacggcatcggcgttttctggatattttgtggcggtacaaagagaaggcatttttcattactctttggagcagggctggagaaagctttttcgtttgaaaagtaagatacactgtatcagctacatagggccttacttatttggcgttggtgaaaagggaacagtcattcgttcggctgatgaagggaaaacctggacgatgtcgagctttccgacaaatgcaacagtgtgggcgattaccggcagaaacaacgggtttgtctgcgcccacggtaagcattgtatttatgtatcggatgattttggtgtctcatggcgcgtagccaaaccttttgccgaatttcataatccccctgttatccggtcgttatgccttcacgggggcaatctctttatcggcacgcaaatacacgaatattttggcggcatttgggcttacgacattaagcgtgacactgtccaagttgtcaaaaaagaaaaaaaccggatgacggcatccatgctcgtgttcaatgaaaattggctggtggcggcgatgggttctgtgaaaggaaagcacggtgctgtcactgtaaggaatcttttgaatggtgaagaattcaccatacaatccagtatgatcagaaatgaagaatcatttcttgatctttcagaggatgatggcattatatatgtcactacaacacaagatgaaaatggtttttcgagaatttaccaggttgatctcgaagcccggtcgttaaaatggttcgataccattaagggacatggatggagagtggccaatcagaaagagaatttcttttgcgcaggcttgtatgaatgtaaatttgtccagccgtacgaagtttcagcaatgattcattagaggaggaacaaggaattggcgaagattttgctcgtttatgcaacaatgtcaggcaacactgaagctatggcagatttgattgaaaaggggcttcaggaggcgttagcagaagtagaccgtttcgaagcaatggatattgatgatgcccagctgtttaccgattatgaccatgtcataatgggaacctacacgtggggagacggagatctgcctgatgaatttttagatcttgttgaagacatggaggagattgatttttccggcaaaacatgcgctgtattcggttccggtgatacagcatatgaatttttctgcggagcggttgatacgctagaggcaaaaataaaagaacgcggtggagacattgtgctgccttcggtaaaaatcgaaaataatccagaaggtgaagaagaggaagaattaataaacttcgggagacaattcgcaaagaaaagcgggtgcgctgtctgatcactcactgggaactgctaaaacggctgttcctttttttcttgtctttgtatctttcctttgatacagtaatgaggtagaaaatcaggaggaggactatacatatgaaaatgatggacgcaaatgaaattatttcatttattcaaaatagtacaaaatctacacctgtaaaggtttacgtgaaaggtgagctggaaggaatcaatttcggtgaatctgcgaaagcttttatcaatggaaacactggtgtcgttttcggtgaatggagcgaaatccaaacagcaatcgaagaaaaccaaagcaaaatcgaagactatgtggttgaaaatgaccgccgcaattctgcgatcccaatgcttgatcttaaaaacatcaaagcgcgtatcgagccgggtgcgatcatccgcgaccaagttgaaatcggtgataacgcagtcatcatgatgggtgcttctattaatatcggttcagtcatcggcgaaggcacaatgattgatatgaacgttgtgcttggcggacgagctactgttggaaaaaactgccatatcggcgcgggttctgtacttgcgggcgttattgagccgccatccgctaaaccggttgtgattgaagacgacgtcgtaatcggcgcaaatgctgttgtgcttgaaggtgtaacagtaggtaaaggagctgttgttgctgcgggagcgatcgtggtaaacgacgttgagccatacactgtcgttgcaggcacaccagctaaaaaaatcaaagacattgatgaaaaaacaaaaggcaaaactgaaatcaagcaggaattacgccagctgtaaggaaaagtttgataaaaaaggcgtggataatatatccacgccttattcgtataggcaggaggaatagaaatgaagatagaggagctcatcgcaattcgcagagatctgcatcgtataccggagcttggatttcaggagttcaaaacccagcagtatttattaaatgtcttggaacaatatccgcaagacagaattgaaattgagaaatggcgaacagggctttttgtaaaagtgaacgggacggcgccggaaaaaatgctggcatacagagcggatatcgatgcgctttctatagaagagcaaactggtcttccattcgcatcagagcatcacggcaacatgcacgcctgcggtcacgatttgcatatgacaattgcactcggcattattgatcattttgttcaccacccagtcaaacatgatttgctttttctgtttcagccggcagaggaagggcctggcggtgcggaaccaatgcttgagagcgatgtattaaaaaaatggcagcctgatttcatcactgcccttcatattgctccagagcttccggtaggcaccattgcgacaaaaagcggccttctatttgcgaatacatcagagctagtcatcgatctggaaggcaaagggggacatgcggcatatccgcatttggctgaggatatggttgtagcagcaagtacacttgtcacccagctgcaaacgattatctctagaaacacagatccgctagacagtgctgttattacagttggtaccattaccggaggctcggcacaaaatatcattgcagaaacggcccacctggaaggcacgatccgcacgctttctgaagaatcgatgaaacaagtaaaggaacggattgaagatgtagtgaaaggaatcgaaatcggattccgctgcaaaggaaaagtgacatatccgtctgtatatcaccaagtttacaatacgagcggattaacagaagaatttatgtcttttgttgctgaacatcaactggcgacagtaattgaagcaaaagaagcaatgactggagaggattttggctatatgctgaaaaaatatcccggattcatgttctggctcggcgctgattctgaacatgggcttcatcatgctaagctgaatcccgatgaaaatgcgatagaaacagcggttcatgtcatgacaggttatttttctgtttatgccaattaagtacaaatgaaagaataaaattccataaaatgagcactctagtaaacggaggtgttcaaaaatggctaaaaaaattggaattgaacaatcgttatcagatgtagaagctgctttaaaagaaaaaggatatgacgttgtaatgatgaaaagccctgctgatgctcaaggctgtgactgctgtgtcgtaacaggtcttgataataatgtgcaagggatagccgatacggtaacacaagcacctgtcattacagcttccgggatgacggctgaagaaatttgtagcgaagttgagagcagaattcagtaataaaaaaaccgaagcaaaaagcttcggttcttttatttattctgtttctttagggaaagcgcggtcgaacgcgttctttatttcttttctcaacactcgttcgactcgccactgttccatattttctgttttggcaatgaccctgattacaatttcagaagtccccagttcttgaatcccgatgacatttgggccttcttttatttgtggaagagccgctgccgtttcatcacaaacctgctgtaaaatatgaatcatttcatcaatatttctttcagccggcactttaatgtcaacaagagcctgcatggtaccacgagaatgattgctcacgtttgtgatgtttctgttggggatgtaatgcagtgttccgtcaaagctgcggatttgagttgtccttaagccaacctgctcgacaattccgtcaaaggtggaaacggtaatataatctccgacatccaattgtttctcaagcaaaataaaaaaacctgtcacgatatcactgacaagcccttgggcgccaaatccgacagccaggccgacgattcctgcccccgctaaaagagcgcttggatcataatgaaacaaatctagaaccatgacgaaaaatatgaaaatcaatgtataagcaaatatgttaagagtcaggcttcggagcgtatgtgcacgtccgatagacaagctattctgctcctcgaattttgcaaacagatgtttaatgattttcatgcctaatgatcgaacgataaaatagagcaatatcataatggcgagtttaatgagcagaacaccggcatttgtaatcagtcccgcccaatcatattgtttaataaagtccatgttgagctccttttctaattgattgctgcacattgagactagttaccctgtacatgaccatgttaaacgttttattcaaaaatgtcgaagccaaagacatacatgatttgttaaaaattgactcaggaaatctgcttttatataatggcattgcaatataactaaaaatggttaatcaccctttattttcatgcgattttgacctttaagccaaacaataaattggagggatacatatggcagaacgtatggtaggtaaacaagctcctcgttttgaaatggaagcagtccttgcaagcaaagaattcggcaaagtaagtcttgaggaaaacatgaaaaacgacaaatggacagtgctgttcttctatccaatggacttcacttttgtttgtccgacagaaattacagcaatgtctgaccgctatgacgagttcgaagatcttgatgcagaagtcatcggggtttcaactgataccatccatactcatttagcttggatcaatacagaccgcaaagaaaacggtcttggccagctgaaatacccgcttgctgctgatacaaaccatgaggtatcccgggaatatggcgttttaatcgaagaagaaggtgtggctttgcgcggattgtttattattaatcctgaaggggagcttcaatatcaaactgttttccataacaacattgggcgtgatgttgatgaaacgcttcgtgttctccaggcgctgcaaactggcggactctgtccggctaactggaaaccaggccaaaaaacactttaattctttccaagaacgaaaagcggtctagcatattcgttaggcctctcttttaaaataggagggaaaaagcaatgaaattacgtcagcccatgccggaattgacgggagaaaaagcttggttaaatggtgaagtgacgagagagcaattgattggggaaaagccgacgcttattcatttctggtccatcagctgccacttgtgcaaagaagcgatgccgcaagtgaatgaatttcgtgataaatatcaagatcagctgaatgttgtagctgtacacatgccccgttccgaagatgatcttgaccctggtaaaattaaagaaacagctgctgaacacgatatcactcagccgatttttgttgacagtgaccatgctttaaccgatgcatttgaaaatgaatatgtacctgcatattatgtgtttgataaaacaggacagctccgtcacttccaagccggcgggagcggtatgaaaatgcttgaaaaacgtgtgaaccgcgttctggctgaaacggaataggtatctgactaaatagtatttcctaaaaacctgacctcatcaggttttttatttgtgcaaaaagcaatggaagaagagtaagaagcttatttttccaaatttgggtataggaattgatgatttgtttgattgatacgctaaaaaacacagctaatttttgatgtttttcctcaattttagataaatctcatatctcataactcgaaaattgtagatattacactaaatttctttaaagaagtaagtaaaatatatattttcaacattataccaaataaactagaaagccccttaatcccttgagaataaaggactcttttgaaaaataaaacattttcagaaaataaggaatttttcatagagtaaatataatagtaaaatgctaaaataatagttgataaaattacttttgtaatctaatatcttaattaaagatgttaattttgatagggggtacattgaggaatgtttaatgaaagagaagctttgcgcttgcggttagaacaattaaatgaagctgaagtgaaagtcattcgtgaatatcaaattgaacgtgataaaatatacgcaaaattaagagagctggacagaaatggaagcccttccgaaatcaaaaaggatttccgttctgaaaaaaaacctgactctctgccggttctcgctgagcttgcggctcaggaaatcagaagctatcagccgcaatcacagcagcagtctgttcagcctcagcttcaatctatttcctctcttcctgccggtataccagacggaacaacacgaagaagaagaggaacggcaagaccgggatcaaaagcagctaagctgcgtgaagctgctattaaaacattaaaacgccacaacgcggcgattaagagctcggagcttcaaaaagagattgaaaaagaaagcggtcttgaaatccctaatatgacaacgtttatgcaaagcttaattaaaatgtacccggaagtgaaaaagccatatcgcgggcagtacattttagagggtgaaatcgaatctgcagaatcagcaaacgaataaatataaagaaaaactgcttggcatcgctcaagcagtttttttattgaggttttttctgtgaaggtttgttttctttttcaagattaagcttatacacccacttttgataaggcttttcttcagcggctctgtttttcagctcttcgattgtatggctcttggcctggtctgatgattgggcgtgggcaagctgtttttgaagcacatgtatctgtttggtgacatcttcaaggatagtctctacatgatttggctgcgcgtaggccgctggagcttcttcttccgttttttctttttgtttcgtgccgccatcaatatcggcaaaatgagaagcaatccaggcatcgctttcatcaagttgccgtttatacgatataatagtttcgtgaaataatttttctttcgttttttctatgtctagcagtctttctttcgtttctatgattcgatctttcatatgatcaacttctattttaatatgttttagctgatattctttttctaccatttgctcttttagacgcccgttttcggcttttatcaattcggcttgctgttttgcctgaagcagtgcattttgttcctgctcaattgaggcttgaagttcgctgatccgtttatgaagatttttattttcttcttcgattttgactttcgcaatatgaagtttatgtttttcttcgatttcggctctgcgtttataggtttcagcagatagaagctcctgcaaaacaacgattttatcaagcagttcagctcttatttggtgcagggtttggctggtgtgggaggcatgtttttcttttgttgacatatgtgttaattcggcagacagctgctggagtttttctttcatatcggtattttctttgagcagtttgttatttttctgatgaaagtagcttgcttcaagttcagaaatcagcttatggcaccttgaaagctcggattttaaataaaggttctcctgagacacgtcgtggaaaaaaggacctgatcttttcattcgaaccatctccctcatgatgttaacactacaatatgcaaatactgaacagctattcctctttaataaacagacaagcagtagcgttgagcctttgcttttgctatgcttttaacgaaactagaggtgagatgatatgaagcatgtaaacgtactgctggcagggggagcctcacgtcgctttggagaaccgaaggcgtttgtcaaatggaagggcaggatgctttacgaatgcgctaaagaggcacttggagaacaaacggttatcatcagccgtcccgaatttattgatagatttcaagaaaacggtgaaaatgaagtgtatcaagatgctgagccatttcaaggcatggggccattggctggtatatataccgcttttaaaaagacagacggtgatctttatactgttctttcctgtgacacaccgctgatacaaagaaggacgatgctggagctcaaacgtctgatgattgccggtgcggacgcggtagtcccaatttcagacggacaagtgcagccattgattgcgatttaccacaaacgtatcatgccagttctatacgatcagctttctgagaagaggttgagaatatcagatttattaggcagaatttcggtttgttacgtacaggctgaaaatatcggagcaaacccggcagagtttatcaacattaatacacgtgatgattttagctgtttggaagaaaaatcgaactccctcaagcgggactgacggggcaataacatgataagatgacataaaagataaggagaacaggtttgatggaggaacgttattcacggcaaatcagatttaagcaaattggggaagagggccagaaaagactggcagacagccatgtgctgattgtcggagcgggagcgctcggcactgcaggagctgaagggctttcgagagcgggagtcggtacgattaccattattgaccgtgactatgtggagtggagcaatcttcaaaggcagcagctttatacagaaagcgatgccaaactccgcatgccgaaagccatggctgccaaagagcatctatcagcgattaacagcgagatacatattgaggcgtatgttaccgaaggaacagccgaaacgcttgagccgctgattgaaaaagcagatgtcgtgatcgacgcgacagataattttgaaacccgcatgctgataaacgatcttgcccagaaaacaaagacaccttgggtctatggcgcctgtgtaagcagccagggaatgttcatgactgtcattcccggagaaaccccttgtctgtcttgtttgtttgagcaaattcctgtcggcggggcgacgtgtgatactgccggcattattccgcctgctgtgcatatcgtttcagcatatcagcaggctgaggcattaaagctgttaaccggccaaaaagaagcaatacagcgggggtttgtgacatttgatgtctggaacaattcgcatatgaagattaacgttaatcatgtacgccgtgaggaatgcccatcttgcggagctaatgcggtatatccttatcttcaggattggaacacaccaaaagctgctgtactatgcggccgtgatacagtgcaggtaaggtcagaatcattaaaaagaatcccgaaacaggagctcattaagcggctgaaaacaatcggcaaggtcgaggctaatgcgtttttgctgcatattttttacgaggatttcagaattgtcattttcaatgacggacgggcactggtgcatggaacaaatgatgtgaaagaagccaactccgtgttggcaagagtgattggactgtaacaacaggaggggtcagaatgctggagaaaagaacaccgataccggtagacgaggcagttcggcgtgtctgccattttcaaaaacaaggtgaaacagaatgggtggcgcttgaagacagccttcatcggtttttagccgaagatataactgcggatcaccacgtacctgcgtttgaccgttcgccatacgatggttttgctgtcagagcgtgcgatacggcagaagcttcacgtgaaaacccagttcggtttgaagttattgaccatattggagcgggagcagtatctgaaaaagaacttggcccgtttcaggccgtgcggattatgactggcgcgcaaatccctgaaggggcagatgcagtcgtcatgattgaactgactcaagcctttgaggagaatgggaagtcatttatgtctttaaaacgccgctttcagacgggggataatatttcaaaaacaggtgaggacgctcaaaaagggagtgttttactgacaaagggcacccgggtgacaccaggagtgacggctcttttggcaacattcggatacgcatctgtgcctgtcgtgagaaagcctgtagtcgggattatcgcaaccggtaccgaattgctgaatgtcagtgatccgctggaaccgggaaaaatccgcaacagcaatgcgagtatggtatatgcgcaagcgatagaagcaggcgcaacaccgctttatttagggaaaatctctgatgaactggataaaagctttgctgcagttaaagaagcgatgaaaaaggtggacttcctgatcacaactggcggtgtgtcagtcggtgactttgactttttgcctgcgatctatgaaaaactcggagcggacgtgctgtttaataaagttgccatgcgcccgggcagcgtgacaacggtggcgcatgcaaacgatatgctgctgtttggcctttcaggtaatccgtcggcatgctatgtcggttttgaactgtttgtcaaaccgataatccagacatggctgctcaatgaaacaccgcattcaatttgtgcggaagctgttttgaccaaggattttccgaagccgaacccatttacccgatttgttcgtgcgctcgtgcaccatcaggaagggaagctgttggcgacacccgttggcttagataagtcgagctctgtcacatcacttgcagatgccaatgcatttattatcctgccgggcggtacgcgaggctacgaatctggcagaacggttcaagtgctgctcatcagagaagagaatggaagtgaatggccttggtccgtcctttcccgatcgtccaagttgtaggatttcaaaacagcgggaaaacaacgtttattgagcgcattcttgaaaaagcctctgaacagggagtccatttgggctgcctgaagcaccatggtcacggcggtgaaccgcaaacgctcacggaaggaaaagacacggaccgttacaaggcggcaggtgctgatgtaacagcggtagaaggtgctggtgtgttacagctgactgcccgccgcaattgggatttggcacggctgattgagttataccaatttctcgaaacagactgtcttctgattgaaggctttaaaaaagccccttatcctaaagtggttatcctaagtgaaaaggaagatctggaagcgctgcaagcagtaaatataatcgccatcatctatagaaaaaaagagcatatgacagagcatcagggattacccgtttttcatgcggatgatccggttgccgtggattttgtgctttcacagctgaagggggaatctgcataatggaacggtttgagattacgaaaacacccattaatactgaaaacatcatcaaaaaagtggagaaacgggaagcgggagccattacaacatttattggtacggttcgggaatggacaaacggaaaaagaacggttcggcttgaatatgaggcatatgaaccgatggccgtgcaaatgcttgctcaaatcggcgctgaaatcgaagaaaaatgggaaggtgcctcagctgcgatcacgcaccgtataggtgtgctcgatatcggtgaagcagcggtagtgattgctgtatcttctccccatcgaaaagccgcatatgaagccaatgagtatgcgattgaacgcattaaacagattgtgccgatttggaaaaaagaaatttgggaagacggtgagcaatggatcggcgaccagctagaaacgacagcttatccgaacggaaaaccagacctaagcgagggagagcagcatgattaaaattcttttatttgcagggcttgctgaacaggccggtacacaagcaatagaaatagatatggaacaagcaaccacagatgaaataaaagcgagtctaaaagaacaatacggtcttgaatctattgatacggctatgattgccgttaacgaaagctatgtaaaagaaaatacctctgtatcttcgggtgacacggtagccatcataccgccggtcagcgggggatgaaaaccggacggcatttcagccgtccggtttttctgtatttcattggcatatccccaagtatcctcagcatacaatgattttctgtaagcgtttattctacatatgttactccctataaagtaagagactcactccataattagactgaaattttgaaaaataatagaaatttatttcgggtatcgatatagtgaagatgataaatgttggaaaggtgctggatatggagacatttaaaagattaaaaatgtattattggccgtacagaaaagtgtttatgtggtcgcttctagccatgcttttgatgactgcaattactgtcgtttatccgattatcctgcaaattacgattgatgagatcgtactgggacggcagtatcagcttgcggcgtgggtcagcttaggatttattgcggtgatggttttgaaaggaatggctaccttttttcatcagtatttaggtgatatgttcgggatcaaatccgtttatcggctgagaaatggtctgtatgaaaaactgcagcggctttctttttcttactatgataacgcgaaaacaggagatttgatgtccaggctgactgctgatgttgaagggcttcgttttttcttatcatacggtctcgctgagctcattcgcttcggcctgctggtagccatcagcctgtcggttatgttttactattctgttcctctcacgcttgtgacaatagctgttctgccatttctcgcggttgcggtataccggtttgacaaaagagtccatcccgccttcagaggcatccgcaaatcgtttgcgaaactcaatacaaaagttcaggaaaatatcagcggcattaatacggttaaatctctttccagggaagattttcagatcagcactttcaataaagccaatgcagaatacagggcgcagtatttacaaacatcatccatttggtctgcgtatttccctttaatggagttcattggtaacacttgtattgtagctcttctctcatacggcggttacttggttatgcaaaatcagctcaatcccggcgagcttgttgctttcttcagccttgtcaattatatgatgtggcccattatgaacttaggttttgtcatcaatatgttctctcaagcaaaagcgtcaggggaacgcctgctcgacattctggaaaaagaagaagacattacagatcatcctcatgctttgcataaacaaaaattaaccggagatgtccatttcaaaaatgtttctcttgcatacggaaaagaacaaacaaacgcgctgtgcaatgtaagctttgaggcaaacagcgggaaggtaatcggactgttgggcccgacaggttcaggcaaaagctcagtgacacagcttctcaccagattttacagtcctgttggcggaatgattaccattgatcacaaacccatcacagattattcgttaaaaacccttcgctccaatatcggggtcgtacttcaagaatccttcctgttttcatctacgattagatcaaatatttcgtatgggcggccggatgcctcaatggaagacgtcatcgaagcggcaaaaagggcgcaggctcataactttattatggagcttcctgatgggtatgacaccatgctgggagagaggggaatggggctttccggcgggcagaaacagcgtattgccattgcgagagccatctgcttgaacccgagcattttaatattggatgatgccacaagcgcagtagatatgcaaacggagcacagcatacagcttgccttaaaagaagtcatgaaaaaccgcacaacctttatcgtcgctcaccgcatttcttcactgaaacacgctgatgaaattctcgtttttaataaaggacgcattcgtgaaaggggaacacatcatgagcttcttgaaaaaggcggctactataaaaagatttacgatttgcaataccgtgatgtcaaaatgattaatgagccgcatgaggtcggatagggaggggccaaatgaaacaagcgaaaaaacagggggttttagagcgtttctattactcttcagatgaaatcattgaaaagccgtttaactgggctcaaatgtggcggctgctgagctatgtcaaaccatatcgaaaaacaattttgccgctttcttttctcactgtattgattggcactgctgtgaagcttgtgatccccattttgatcggcgtttatgttcttgatcaagcgattacagggagaaactcggagctgctgattcagctcatttttattattagcggtttatatgtcctcaattacgccgccaatgtgttaagaatcaggtggatgaatcagcttggccagcatgtcatttacgatttgcgacagcatttatttacccatgtgcagcgcttatcccatcgattttttgatcagcggtcggcgggatcgatcttagtcaggatcatgaatgatattaactctcttcaggagctctttacaagcggagtcatcaatttgttgaccgacttgctgcttctggccggcgtgattattattttgtttacgctgagccctgagctgactatagccatcatggtgacattgccgattatgttttttatttcaacaagtctcagaaaaaaaatacgccgatcctggcaaacggtacggctgaagcaatcgaagctcaactctcatctaaacgaaagcattcagggcatccgggtcacgcaggcatttacgcaggaagaagaaaacatggcgtattttgacggtgtcaatcaggagaactacgaatcatggcgggaagcaactagaaaaaatgccatgttccgtccgcttgtagaaatgacgaatgcgattgggacggctgtcttgatttggtatggagccacactcatcatgaatgaaaccattacgattggcgtcttcgtttcttttgctttctatctgggaatgttttgggaacctatttcgagactgggtcaggtctataatcagctgttaatggggatggcatcatcagaacggatttttgagtttctggacgaacagccaaatgtcaaggagaagccgaatgccattcataatgaaaagataaatggggagatcagttttgaagaggttgaattttcgtatgatgaaaaacgaaaagcccttcacgccgtttctttctctattcctgcgggatcgacgcttgcgcttgtcgggcatacagggagcgggaagacgacgattgccaatttaatcagccgtttttatgatgcggccggaggcaccattaaaatagacggtataccgattaaggatctttcccttgccagtctgcgctctcaaatcagcattgtcctgcaagatacatttattttctccgggaccatcatggaaaatattcgttttggaaggccaaatgcttcggatgaagaggtgatgaaagcgtcccaagcggtcggagcggatgagtttatttccgatttagcggaaggatacgcaacagaggtagaggaaaggggcagcgtactgtctgccggtcagcgccagctcatttcatttgcaagagcattgctcgccgatccggctattatcatccttgacgaagcaacggcaagcattgatacagagacagaagtaaaaattcagcaagcgttaaaaacgcttctgaaagggcgtacagcagtgatgatcgctcacagattgtctacgatccgcgacgccgaccgcatcattgttcttgatcacggcaggaaaatagaagaagggaaccatgatcagctgctcgctaaaggaggcatttatgccgggcttgtgaaagcgcaatacagcacagcgatagaataatatgaaaagccttcaatattgaaggtttttggaaatttattagaaaaacatgaaactttttgatatccttcccgtactatttgttagatattctcaaggaggttttgaaatggaaacgaatgtagaaaaaaacagcggaacggcgactgaaaagccttcacttttcggagtaatcacaagtccgtccgttcaatttgaaagaataagagaaaggccggctgtatggggaccgcttttgattgttgcagcaattatcatcgtcggtgccgtgctgcaatcactcggtacggattatagtgagcttttgaaaagccaggatacgcaagggctatctgctgaacaaatggaaactgtcgcaacaataaccaaatttggcggaatggcaggcgctattatcggcggtatcgcagcattatttattgcccctcttatttattggctctgtgtaaaagtatcaggcggtgttacgacatataaaaaaatgctttctctcagtctgtttgtctctttgattagcagtctcggattattggttaatggaatcgttgcttttacgactgacgtgaatcctctttacagcacgacgtcactcgcagggattatcccatctgacggggctctcgccagtgtgttaaatacctttgaaattttcagcatctggagctttgtattattagcaatcggacttcacaaaacgggaggcatctcaaaaaaagccgggtggatttcagcaatcattctattcggaattttagttgtattttcgcttttttcaggtttaatcaattctgtggcgggtgcataagctcatgaaaaaagtctggatcggaattggaatcgcagttatagtcgctctttttgttggaatcaatatataccggtctgccgctccgacaagcggcagcgccggcaaggaggtacagacggggagcgttgaagaaaatgaaatctcatcaacggttatggttcctggcacgctaaaattttcaaatgaacagtatgtcttttatgaagcggataaagggacattagaagacattaaagtaaaggaaggcgataaagttaaaaagggcacggctttagtcacctatacaaatgagcagctgagcctggaaaaagaacagaaccagttaacgtctgaatccaaccggcttcaaattgaccaaattcaagaaaagttaaaagccttggacagcaaagaaagagaactggaaaaacaggtaggaaagaaagaagcagaaaaacaaatcgaatctgaacggacagagcttcaaatgcagaaaaaaacagcggagatcgaattaaaacaaaccgagcttcagcggcagtcacttgccaaccgggtgtcagatttagaagtgaaaagcgaaattgaaggcaccgttatttctgtcaaccaagaagcggcatccaaaaagtcagatattcaagagcctgtcatacatatcggcaacccaaaagaccttgtcgtctcagggaaattgtctgaatacgatacattgaaagtcaaaaaaggccagaaggtcacactcacttcagatgtaatacagggtaaaacatggaaaggcacggtttccgcagtcgggcttgttccggatcagcaggagagcgctgcggcacaaggaacagaacaggcggtccaatacccgcttcaagtgaaaataaaaggaaatcttccagaaggaaagccaggctttaaatttatcatgaatattgaaacagataaacggaaagcaaatacgcttccttcaaaggcagtcaaaaaagaagatgaccaatattatgtgtatacagtaaaagacggaaaagcaaagcgagttgatgtcaaaatcggcgaagtgacagatgacctgacagaaattaaagaggggcttacccaagatgatcaagtcattttgaatccatctgatcaggtgactgacggaatggaagtgaaatcctaaatgattcagctttctaatgtgcgaaaaagctaccagatcggaaaggaaacgtttgatgttctccattctattgatttggacattcatcaaggtgaatatgtctcgattatggggccgtcaggatcaggaaaatcgacgatcatgaatattatcggctgtcttgatcggccgacttccggtacatatcaattggacggcgaagacatttcttcatataaagataaagaactggcggcagtccgtaaccggtccatcggttttgtatttcagcaatttcagcttcttccgcggctgaacgcaaaaaaaaatgtcgagctgccgatgatttattccgggataggcaaaaaggaacgtcaagagcgggctgagagagcattggaaaaggtcgggttagccgatcgaatgctccacatgcccaacgagctgtcgggcgggcagaagcagcgggtggcgattgcgagggcgatcgtgaatgagccgaaattgattttagctgatgaaccgaccggcgcgctggatacgaaaacaagcgaggcgattatggatcagtttacagcattaaatgccgagggaacgacaatcgttctggttactcacgagcctgaagtagcagattgcacgaatcggatcgtcatggtgcgtgacggaaacattgttcctgccagctccggacaaaggagtgtgggagaatgagcctgttggaaaacatcagaatggctctaagctctgtccttgcccataaaatgcgttcgatcttaacgatgctcggcattatcattggtgtaggctctgtcattgttgtcgttgcggtaggacagggcggcgagcaaatgctgaagcagtcgatcagcggcccgggaaatactgtggagctgtactatatgcctagcgacgaggagcttgcaagcaacccgaatgccgcagctgaatctacgtttacagaaaacgatattaaaggtttaaaaggaatagaaggcattaaacaagtcgttgcttcgacttctgaaagtatgaaagcgcgttatcacgaagaagaaaccgatgctacggttaacggaataaatgatggatacatgaatgtcaattctttgaaaatcgaaagcggcagaacctttaccgacaatgactttctcgcggggaatagagtcggaatcatctctcaaaaaatggctaaagagctgtttgataaaacctcccctctaggtgaagttgtctggattaacggacagcccgttgaaattatcggcgtgctgaaaaaagtaacaggcttgctttctttcgatttaagtgaaatgtatgtgccatttaatatgatgaaatcctcttttggcacaagtgatttcagtaacgtatcattgcaggtcgaatcagcagacgacataaaatcggctggaaaagaagcggcacagctggtaaatgacaatcatggcacagaggattcgtatcaagtgatgaacatggaagagattgcggccggaattggcaaagtaactgcaattatgacgacgattatcggctcaattgcaggtatttcccttttggtcggcggaatcggtgtcatgaatattatgctcgtatcagtcacagaacggacgcgggaaatcggaatcagaaaatcacttggtgcgacgaggggacagattctgactcagtttttaattgaatcagtcgtattgacgctgattggcggtctggtcgggattggtattggatacggaggggccgcgcttgtttcagccattgcgggctggccgtcactcatatcctggcaggttgtatgcgggggcgtgctgttcagtatgctcattggtgttattttcggcatgcttcctgcaaataaagccgcaaagcttgatcccattgaagcgctgcgttatgagtagcctcatgcaacatgcatgaggtttttttatgtttagtgatttctactatgaatataaaagacttttttcattaaaataagaagaaaatgtcgtacaattgtccttatttttgtcgaatttacagtttacaaaccctatagacatacgttaatatggagaaacgtgaaagattttgatagttattgaatgaatttgaatgattttagttgcctaaaccgaaaatagcgtttacaatgaaattgtattcaaaatgaatacgttttcattaggaggtgaagcatgctaactcctgaacggcatcaattgattattgatcaaatagaaaagcatgatgtggtaaagattcaagagcttataaatctgactaatgcttctgaatcaacaatcagaagagatttatcgacccttgaagaacgcggttttttaaagcgcgttcatggtggagcggccaagctttccgatatcagacttgaacccgatatgcttgaaaaatcatccaaaaaccttcacgataaactgaagattgctgaaaaagctgcttctcttttagaagaaggggattgcatttaccttgatgcaggcacgacgacattgcacatgattgattttatggataaaaccaaagatattgtcgttgtcacaaacggggtaatgcatatcgatgcattaataaggaaagaaatttctttttatctgcttggaggatacgtaaagcacagaacgggcgcgattattggaggcgcttcattggttgccatggaccagtacagatttgacaagagttttctggggacaaacggtgtccatacagaggctggatttacaacgccggaccctgatgaggcccttttaaaacagaaagcgatcaaacaggcaaaacacgcttacgtcttagcagacccttcgaagttcggagaaatttcattttcggcattcgccggaataggcgacgcaacaatcattacgactgacgctgaagagcttacattcgataattaccaagaaaaaactgtcgtaaaggtagtgaaaccatgatttacactgtaacacttaatccatctgtcgattatatagttcacgttgaagattttactgtaggaggcctgaaccgttcttcgtatgataccaagtatccagggggcaaaggcatcaacgtatcgagactgctgaaaagacaccatgtggcgtctaaagcgctcggattcgtcggcggatttaccggagaatatatcaaaacatttttacgggaagaaaacctggaaacagctttttctgaagtaaaaggggatacccgtatcaatgtaaagctgaaaacgggtgatgaaactgaaattaacgggcagggaccgacaatttcggatgaagatttcaaagcctttttagaacagttccaatctttgcaagagggagatatcgttgttcttgcaggaagcattccatcttcactccctcacgatacttatgaaaaaatcgcagaggcctgcaaacagcagaacgcacgagttgttctggatatctcaggcgaggctcttttgaaagcaacagaaatgaaaccatttttgatgaagccaaatcatcatgagcttggagaaatgttcggcacggccattacatctgttgaggaagccgttccttatgggaaaaagcttgtagaacaaggcgctgaacatgtaatcgtatcaatggccggagacggagcgcttctgtttacgaacgaagctgtttattttgctaacgtgccaaaggggaaattggtaaactcagtcggagcaggggattccgttgttgcaggtttccttgccggaatttccaaacagctgccgcttgaagaagcattccgcttaggagttacttcaggcagtgctaccgcgttctctgaagaacttggaacagaagaatttgtccagcagcttcttcctgaagttaaggtcacacgtctatagaggaggaaacacaagtgaaaataactgagcttttaacgaagcatacgataaagcttaatattgagagcaaagaaaaagaaaatgttattgacgaaatggtcactgttcttgataaggctggaaagttaaatgaccgacaagcctataaagaagccattttaaatcgcgaaagccaaagctccacgggtatcggtgaaggaatcgctatcccccatgcgaaaacggcaagcgttatcaacccggcgatcgcgttcggacgttcaaaagacggcgtcgattatgaatcattagacggccagccggctcacttagtgttcatgatcgcggcgactgaaggcgcaaacaacactcaccttgaagcattgtcaagactttcaacgctgttaatgcgtgaagaaatccgtaagcagctccttgaagctgagtctgaagatgccatcatcgacattattaatcagcacgataaagatgatgacgaagaggaagaggaagaagaagcggcaccagcacctgccggaaaagggaaaattttagcggttactgcatgcccgacaggtattgcccatacattcatggctgcggatgcccttaaagaaaaagcgaaagagcttggtgtggaaattaaggtcgaaacaaatgggtcaagcggcattaagcacaagctcactgcccaagaaatcgaagatgcacctgcaatcattgtcgcagcggacaagcaggttgaaatggaacgttttaaaggcaagcgcgtacttcaagttcctgtaacggcgggtatcagacgtccgcaagagcttatcgaaaaagcgatgaatcaagatgcgccgatttatcaaggcagcggcggcggttcagcagcttcaaatgatgatgaagaagcgaaaggcaagtctggaagcggtatcggaaacacgttttataagcacctgatgagcggtgtcagcaacatgcttccgttcgtagtcggcggcggtattctcgttgcgatttcattcttctggggaattcactctgctgatccgaatgatcctagctacaacacgtttgcagcagcattaaactttatcggcggcgacaatgcattaaaactcattgttgcagttctggccggtttcattgcgatgagtattgcagatcgtcctggttttgcgcctggtatggtcggcggatttatggcaactcaagcgaatgctggattcttaggcggcttaattgccggattccttgccggttatgtcgtgattttactgaaaaaagtatttacgtttatccctcagtcacttgatggattaaaacctgttttgatttacccgctgttcggtatttttatcactggcgtattaatgcaatttgtcgtcaatacacctgtagcggcatttatgaatttcttaacaaactggcttgaaagccttggtactggaaaccttgtgttaatgggtattatcttgggcggcatgatggcgatcgatatgggcggtccgcttaataaagcagcctttacgttcggtatcgccatgatcgatgcaggcaactatgcgcctcatgcagcaatcatggccggcggtatggttcctccgcttggtatcgcacttgcaacaaccattttcagaaacaaattcactcagcgtgaccgtgaagctggtattacatgctatttcatgggagctgctttcgtaacagagggagcgatcccatttgctgcggctgatccgcttcgcgtcataccagctgctgtagtcggtgcagctgttgccggcggattaactgaattcttccgagtaacgcttccggcgcctcatggaggagtattcgtagctttcattacaaaccatccgatgctttaccttttaagtatcgtgatcggtgctgtcgtgatggcaattatcctcggtatcgtcaaaaaacctgttacagaaaaataagaaaaaaagcgtccttggttcgaaaggacgctttttcttatccggccggcagggagcgcggttaagttatgtattttattcttttttatgataaagtaaaagaagagaaacaactgacatagcaattgtctaggaggaaacactttgaccgaggaaaaaaatacgaatactgagaaaacggcgaagaaaaaaaccaatacgtacctggaatggggtaaagcgattgtcatcgctgttctgctggctctcctgatccgtcactttttgtttgaaccgtatttagttgaaggttcatctatgtatcccacattacatgacggagaaaggctgtttgtgaataaaacagtcaactatatcggcgagctgaagcgcggagatatcgttattatcaacggtgaaacttctaaaatccattatgtaaaaagattgatcggaaagcctggagaaaccgttcaaatgaaggatgacacgctttatataaacggtaaaaaagtagccgagccttacttgtctaaaaacaagaaggaagcagaaaaacttggtgtcagtctgacaggagactttggaccggttaaggttccgaaaggcaaatactttgtcatgggagataaccggctgaattctatggacagccgaaacgggctgggactgatcgcggaagatcgaattgtcggcacatcgaagtttgtctttttcccgtttaacgaaatgcgtcaaacaaaataaaaacgccttgctggcctaggacagcaggcgtttttattttgaaaaagaagcgaccaatgcaatgcataaaaccgtgatgaacactgaaccgataatagccagcacactgaagaaaaggtgaacctgtttgttctcttttccgcgcttttctaatagccgtttagaaaaaatgtgcgaaaatatgtaaataagggctatgcctatatataagccgatatctttggcggtaaagcctgttacggcaaggtaaaagcccgtaaaaaagatcagtaagcaatattcagtaagtgttaaaagcctcaacgtgttcctccatgagagtgtgtaattttccaggcggatgcattctctctctttaattgtaacacagctggctggtttgggtgtataagtgttttctctctgttttatcagggaatcatttctcttgccctgcattcatggtatacttttattgatgatagacatgatggaggataataaatgattgctgtaaataatgtaagcttgcggtttgcggatcgcaagttatttgaagatgttaatattaaatttaccccaggcaactgctatgggttaattggtgcaaacggtgccggtaaatcaacgtttctaaaggtgctgtcaggcgaaatcgagcctcagacaggcgacgtgcatatgagtcctggcgagcgtcttgccgtcttgaagcagaaccattttgagtacgaagagtatgaagtgctgaaagtggtcattatgggccacaaacgcctgtatgaagtcatgcaggagaaagacgctatttacatgaagcctgatttctcagatgaggatgggattcgtgctgctgagctagaaggtgaattcgcggaactgaacggttgggaagcggaaagtgaagctgcgatcctgttaaaaggccttggtatctcagaagatctgcacacaaaaaagatggcagacctcggcggttcggagaaggtaaaagttctcttggcacaggcattattcggcaagccggatgttctgctgctcgatgagccgacgaaccacctggaccttcaggcaattcagtggcttgaagagtttctgattaactttgaaaacacagttattgtcgtatcccatgaccgtcactttttaaataaagtatgtacgcacattgccgaccttgattttaacaaaattcaaatctatgtcggaaactatgatttctggtacgagtcaagccagctggcgttaaagctttctcaagaagcgaacaagaaaaaagaagagcagattaaacagcttcaagagtttgtcgctagattcagcgccaatgcgtctaaatctaagcaggctacatcaagaaagaaacttctcgaaaaaatcacgctggatgatattaaaccgtcttcccgccgctatccttatgttaacttcacgccggaacgggaaatcggaaatgatgttcttcgcgtggaaggcttaacaaaaacaatcgatggcgtaaaggtgcttgacaatgtcagctttattatgaatcgagaagataaaattgctttcactggccgaaatgaacttgctgttactacgctgtttaaaatcatttccggggaaatggaagctgacagcggaacgtttaaatggggtgttaccacatctcaagcgtattttccaaaagacaacagcgaatatttcgaaggcagtgatctgaaccttgtagactggcttcgccaatattctccgcacgaccaaagtgagagctttttacgcggtttcttaggacgcatgctgttctctggagaagaagtccacaaaaaagcaaatgtactttccgggggagaaaaggtccgctgtatgctgtcgaaagcgatgctttctggcgccaatattttaattttggatgagccgaccaaccatttagacctagagtccattacagcgctcaataacggcttaatcagctttaaaggcgctatgctgtttacttcccatgaccatcagtttgtgcagaccattgccaacagaattatagaaattacacctaacggcatcgtcgataagcaaatgagctatgacgagttccttgaaaatgctgatgtgcagaaaaaattgactgaactatacgccgaataaaaaagcagagatttctctgctttttttgatacctaaatgtgaaaggagatcacaacatgaaatttttggttgtcggagcaggtggagtaggcgggtatattggcggacggctttcggagaaaggaaatgatgtgacatttctcgtgcgccaaaaacgagctgagcagcttaaaaaaaccgggcttgtcatccatagtgaaaaagggaatgtatcatttcagcccgaactaatcagtgccggagaaacagggcaatttgatgtcgttatcattgcttctaaagcatactcgcttggtcaagtgatagaggatgtcaaaccatttatccatcaagaatctgtcattatcccttttttaaatgggtaccgccactatgagcagctatttgcggcattttcaaaagaacaggtgctgggcggcctgtgttttatagaaagtgctttagacaacaaaggagaaattcatcatacgagcgcatcgcatcgttttgtatttggagaatggaacggcgagcgtacggagcggataagagcgcttgaagaggcattttcaggtgtgaaggctgaagtcatcattagcgggcatatcgagaaggacatttggaaaaagtatctctttattgcagcgcaagcggggatcacaacgttatttcaacgaccgcttggcccaatcctcgccacagaagccggacgtcacacggcccaaactcttattggggaaatttgcactgttttacgaaaagaaggtgttccggctgatccggctcttgaggaagagagctttcgtacgatgaccagcatgtcttaccatatgaagtcctccatgcttcgggatatggaaaacggccaaacgacagaaggcgaccacctgcatggatttttgattgaaaaagcaaaacgtttatctctcgctgcaccagtattagaaaccgtttatgcgaatctgcaaatgtatgaagcagaaaaataaaaaaaggaggcggaaaagcctccttttatttacttaaaaagcccaatttccgtttctgaagataggctctcttttcccgtctgccgtaattccgtcaatattcatatccttagaaccgatcataaagtccacgtgtgtaatgctttcatttaggccttctttgacaagctcttcacgagacatctgctttccgccttcaatattaaaggcataggcgcttccgatcgccaaatgatttgacgcgttttcatcaaacagcgtgttatagaaaagaatgtttgattgtgatataggcgaatcgtaaggaacaagtgccacttcacctaaatagtgagaaccttcatctgtttccaccagttcttttaaaatatcctcacctttttcagctttaatgtcgactatacggccattttcaaacgtcagggtgaaattttcaataatatttccgccgtagcttaatggttttgtgcttgataccactccgtcaaccccgtctttttgcggcagcgtgaacacttcttctgtcggcatattggccataaactcatggccactttcattcacgcttcccgcacctgcccaaacatgcttcctaggcagcttaattgttagatcagttccttctgcttgataatgtaaggcagcgtaatgtctctcgttcaaatggtcaactttttcatgaagattttggtcatgattgatccacgcctgaaccgggttgtcttcatttacgcgcgtcgctttaaaaatttcttcccacagaaggtggatcgcttcctcctctgatttgccaggaaacaccttgtgagcccagcctgctgatgccgcacctacgacagtccagctgactttgtctgattgaatatattgtctgtatgtatgtaatgctttgcctgctgctttttggaatgccgcaatccgtttggaatctataccttttagcaagtctgggttcgacgacacaacagaaatgaaagcagctccatttttggcaagctcttctctgccttttgcttcccattcaggatattcttcaaatgcttcaaacggcgcaagttcgtattttaatttggcgacttcgtcatcctgccaattcacggtgacgttttttgcgcccttttcatatgcgtgttttacaattaaacggacaaaatcccgaacgtctgttgaagcatttacgactacatactggcctttttggacattaacgccgacttctaccgccagctgtgcatatgtatttaatttctgtgaaaatgaatccatgaatcattcctccaagcttttttctcatcatatcaaatatgatcctataaaggaaagaaggagcccaaagtgaaaaacccaaaacgacacgtcttgggttttttcaatattatggatgattcagttttacagtgccgcctgcaggcgaatggggcatatttgccaaagaaatgctcatgcctccaagaataattccgcttaaaatggctgcgatcgctactcttcttcctaaatctcttagcatctgtttcctccttaacgtttctccatttcccacaatatgaaggaagtgaggaaaaaagaagcaagaaatttgccgcgtgtgagaattttgcgggtaaagactatttaattgccttttgcagcttatcaatcacttctaaagaacggcctgtgccgattgctacagattcaagcgggttttgcgccacgtgtacaggcacgacaatctcttctgtgagccattctttaattccattaaggagcgcgccgccgcctgttaaaataacgccgcgatcaacaatatctccgctcaattcaggcggacagtcctcaagtgtcgctctgatggcttcaagaatatgcaggagggattcacgcattgcatcttgaatttcgttggattgaagcataatggtttttggaagacctgtcacgaggtcacgtccccgaatttccattgcctctggtatatgttcaatcagagcatggccaatttccatttttacctgctcagctgtgcgttcgccgatcagcaaattgtattttttacggacgaaagaaacgatatcctcatcaagctggtctccgccgatcctgatagaatggcaggaaacaacgccaccgaaggaaataatagcgacctctgtcgtccctccgccgatatctactaccacattggcaaccggctcatcaaccggtaaatccgctccgatggcggctgcaactggctcttcgattaaatgaacgtttttcgcgccgcaatttttcaccgcatcactgatggcgcggcgttctactgctgttgagcctgatggtgtgcaaacgactacgttcggttttctgaacgacatgccgatgctttttgcggcttttttcataatgtgctttagcaggtcagttgtcatatcatagtctgcgatcacgccatctttcatcggtctgacagcgacaatttttcccggtgttttaccgatcatgtttttcgcgtcagctccgattgcaagcactgcttttgtcgtcgtatccactgcgacaacagatggttcatttaggataatccctttatttttgctgtaaacaagtatattagctgttcctaagtcaatcccgatttcagttgattgaaacatgttttcacccaatctctatcctaatttaatatgattctacatttaaagtttctcagaaatactgcgatttttgggggtgtgcgtcggtaaagaaatgtttttgtaaaaaatcaaggaactgtgtaacagaagtaatacatttttcggttttatggaaaaaatatcttgtaattcttatagaaagcgggaaactttttcaaagtttcattcgtctacgatatattgaggtacatccttaaaacattacatgagaaaagaaacatttaaaggaagaagggtttttatgaaatcaataggtgttgtgagaaaagtagatgaattaggccgcattgtcatgccgattgagttgagacgggcattggatattgccataaaagacagcattgagttttttgttgacggagataaaattatcttgaaaaagtacaaacctcatggcgtttgtttaatgactggagaaatcacttcagaaaataaagaatacggcaacggtaaaattacgctaagccctgagggtgcacagctgcttctcgaagaaattcaagccgctttaaaagaataaaattatgctaaaaaaggcggagtgatatcatctccgccttttttgcgtgccaatttttgattaccgccgcctaagataagacatcaagatatttggtaatgaatgatttgggatactttacatattttactcaattatttgtcgaagaatggtacaataagtagagaaacacaagcggcaggtggtcatatgagaaaatatcaagctcgtatcatttccatcattttggcaatgatttttataatgttttgggattatttattttattttataggcaaaaacccgattaattggcctgttgatattgtgtatactgcagtcacgctggtaagtgtctggatgttggcttattatattgatgagaaacagcagctggttaagaaaatgaaggataacgaatggaagtataaacagctttctgaagaaaaaaaccgcatcatggataatttgcaggaaatcgtatttcaaacgaatgcaaaaggtgaaattacatatttaaaccaagcgtgggcatctataaccgggttttcaatcagtgaatgtatgggaacaatgtataacgattacttcataaaagaaaagcacgtagccgaccacattaacacccaaatccaaaacaaagcgtcttctggcatgtttacggcaaaatacgtgacaaaaaacggcacgattttttggggagaagttcattataaactttactatgaccgggatgaccaatttacaggcagcctgggtacaatgtcagatatcactgagcggaaagaggctgaagatgagctcattgagattaatgaacggctggcgagggaatcccagaaactatcaatcacaagtgaacttgccgcaggtattgctcatgaggtcagaaaccctttaacatctgtcagcggtttcctccagattatgaaaacacaatatccggacagaaaagactattttgacatcatcttttcagagattaaaagaatcgatttagtgctcagcgagctgctgctgcttgcaaaaccgcaggcaatcacatttaaaacacaccagcttaatgagatcttgaaacaagtcacgacattgcttgataccaatgcaattctgtccaatatcgtcatagagaaaaatttcaaagagacagatggctgtatgattaatggagacgaaaatcagctgaagcaggtctttatcaacatcattaaaaacggaattgaggcaatgccaaagggcggtgtcgtaaccatttcaactgctaaaaccgcctctcatgcagtgataagcgtaaaggatgaaggaaacggcatgccgcaggaaaagctgaagcagattggcaaacctttttattcaacaaaagaaaagggcactggactgggacttcccatttgtttgagaatcctgaaggaacatgacggggaattgaaaatcgaaagtgaagctggaaaaggcagcgtctttcaagtggttttgcctttaaaatcagacagctgagaggagaaaaataaagtgaactcgcttctgtttgtatacgggacattaagaaagcatgaaaaaaaccatcatttgctggcacaatcggcatgtatcaatgagcaggcgagaacaaagggaagtttgtttgctgcaaaagaggggcccacagttgttttcaatgatgaagatgaaggctatatatatggcgaagtatatgaagcagatgaattgtgtatacataagctcgatcaattttttcaaggatatcataaacaaacggtgtttgtagaaacggatgtcgggattaaaattgcgcttatttattttatgaacaaagacgggtgtgccggttttacgaaaataagcagcggcgactggaaagaacatcagatgatcagcaaatcgaaaaatcccatttattattttgcctatggatcatgcatggataatgcccgctttcaaaaagcgggagtcgatcactattttcaagatccagtaggaagagctgttttaaaaggatacacaacccgcttcacgctaaaaagggaagacggttcaagagcggacatgttggaagacggaggaacaacagaaggcgttttataccgtatcccttattctgctctctcctatctatataaaagggagggcgtcgaatctcttacgtatcggccggcatttgtagacgttgaagctggcggaaggcactacaaagactgtttaacctttctcgtcctccaaaaagaagcggaaattgccccgcctcagcactatcagattgaaatcgaacgcggagcggagctgtatttgtcgcctgagtttactgaaaagctcaagcggcatatgaattcgctgccaaaaggataacactgtaacaaaagaatatgataaaatttgatcaatatcatgtcatataaaggagcaccacgatgaaaaaagaatttgcggtaattgggctgggccgttttggtggcagtatttgcaaagcattaagcgaagaaggcgtcgaggttatggcaatggatatcgatgaagataaagtcaacgagtatgccaagattgcatctcacgcagttatcggtgattcgacagacgaatctgtcctgaaaaatttaggcctgcgaaattttgaccacgttattgtagcaatcggggaaaatattcaagcgagtattttaacgacactcattctgaaagaacttggcgtccatacgattacagttaaagcgcagaacgattatcacgaaaaagtgctgtctaaaattggtgcggatcacatcgtccacccggaacgcgatatggcaaaacgaattgcgcataatatcgtgtccaacaatgtacttgactatttggagctgtctgaagagcatagtcttgttgaaatcgtagctaacagccgcctggctggaaatacgcttctcgatttagatattcgcgcaaaatacggtattaacatcgtagccataaaaaggggcaaggaagtcatcgtatcaccgcttgcaaccgaagtcatccaccaagaagatatactcattgttattggatcagttacagacatctcccgtttcgaaaaaagagttcttcatacaaaatagcagccaaataagccgtcctcaaagggcggtttttcatattatcagaatataacaactttaatgaactgagcgtcaatttcttaaaatttcattgactaagcacaggcgttccgatagcatattgtaccatataataaaaaaaggaggggcctatttgaataaagaagcgctagtcaataggctgaatgcttcagccaaaagacaaaaagctgatatcgtcattaaaaacggaaaaatcatggacgtatataatcaagaatggatatatgaagatattgcgattacagatggagttattgtaggcctcggtgagtatgaaggcgaaaatatcattgatgcagagggacaaatgattgttccgggttttattgatggacatgtacatattgagtcgtcaatggttacaccgattgagttcgctaaagcagtgttgcctcatggcgtgacgacggttgttacagatccgcatgagatcgcgaatgtgtctggtgaaaaagggattgagtttatgcttgaacaagctcggcatacaccgctgaatatccattttatgcttccttccagtgtgcctgccgcaagttttgagcgatcaggcgcaattctcaaagctgccgatctcaagcctttttatgaagaagaagaagtattagggctggctgaagttatggattatgtgtcggttcagcaggctgaaaaagacatggttcagaaactgcttgatgcccgtgtggcaggaaaaaggatagacggtcatttagctggtttatcaacagacctcattaacatttacagaaccgcatttgtcttaaacgaccatgaagtaacatcgaaggaagaagcccttgatcgtatcagaaggggcatgtatgtcatgatgcgtgaaggatcagtcgccaaaaacacgctcaatgtgctgccggcggtgaatgaaaagaacgcacgccggttctttttctgtacggatgataagcatgtggatgatttattgtcagagggaagtgtaaaccatcaggtgaaaatggcgattcaagccggacttaatccgtttttagcctatcagctaggaagcctcaatgcagccgaatgctacggattagatacaaagggagcgattgccccgggttttgacgctgatttgctttttgtatctgatctggaaaatgtcactgtcacaatgacgatggtaaaagggcagactgttgctgaagacagcaaagcggtctatcaggatcatgcttcaactgcagcaccagatcaggcactgcttgattctgttaagcttgctgctcctcttaacaaacaggattttcatatgccaatcgattcagagcagcagatcaatgtcattcaaatcataccaaatcagcttgaaacacgattagtacaagttccggctcctgttgcccgcgaatttgagcctgacactgagcttgatttgttaaagattgcagttgtcgagcggcataaaggattaaaagaaaccggacttggtgttgtgaaaggttttggattcaagagcggagcgattgccacaaccatttcacacgactcccataatattattgccgtcggaacgaatgatgaggatatcgcggcggcagttaataagctgcaggaaattggcggaggattaacaattataaaaaatggggaagagctccattcagtaccgctgccgattgcagggttattatccgaccaatctgcagagcaagtgaatcaaagcttgctgacgcttcatgataaattgtcgttaatcggtttcacaggcggatttaatccatttttgacattgtcgtttttagcgttgcctgtcattcctgatattaaaatgacgactacgggattattcgatgtaaaatcatttcaacacatatcactgcaataaaaagaggcactcccttagggagtgcctctttttttaaacctccataatgatcggcaggatcattggacggcgctttgttttttcgtacaagaaaggtgcaagcgtgtctgtaatttcgtttttgatttcagaccattgagtcgtttttcgttccattactttttgtaagtgatttgaaatgagctcttgagcgtcgttgatcaagtcaccagattctctcatgtacacaaatcctctggaaatcaaatcaggacccgctgaaatcttgaagtcgtccatgtcaatgctgacaacaacgatgacaagtccttcttcagagagaattctgcgatcacgaagtacgatattgccaatatcaccgataccgcttccgtcaatgtacactgaaccggacgggatttttcctgcaactgaagcctcatcgcctttaagtgctaatacttcaccattatccatgataaagcagttttcctctgggatgccacaatctgttgcaagtttgacatgcatcttttgcattctgtactcaccgtgaatcggcatgaagaatttaggcttgattaaacgaagcatcagcttctgttcttcctgtccgccgtgaccggatgtatggatatcgttaagagggccgtgaataacctcagcacccgcacgatacagctggttgattgttcgactcacgctgattgtgttgcctgggataggggatgaagaaaatacgactgtatccccaggattgattgaaatttggcggtgtgtgccgtttgcaattcttgataacgccgccattggttccccttggcttcctgtacataaaattgttactttattagcaggcatacgattgatttcgttatgctcaataaacgtatttttaggacagttaatataaccgagtgtctgtccaatttcgatagccgattccatactgcgtccaaatacggcaacttttcttccattttgtacagcagcttcaattacctgctgcaagcggtgaatattcgacgcaaatgtggcgaagataattcggccgtccaccttgcggaaaatgtcatgaatgctttctcctacacggcgctcagacatggtaaactccggattttcactgtttgtgctgtctgaaagaaggcacaaaacgccttctttaccgatttcggccattttcgttaagtttgccggctcgccgactggagtaaagtcgaatttgaaatccccagtatgtacgatgtttccgggcggcgtttttacaacaatgccgtaggaatccggaatactgtgtgttgttctgaagaatgacacagccgttttgcggaactttacaatatcatcctcgccgataatgttcagtttcgtctgtctcaataatccatgctcttcaagtttattccgaagtaagccgatcgcgagttttccgccgtatacaggaatattcacttgtctgagcaggtatggaataccgccgatgtggtcttcgtgcccgtgggtgataaaaagccctttaattttatcttcgtttttgactaaatacgtataatcagggatgacgtagtcaattccgagcagttcgtcctcgggaaacttgatccccgcatcaatcagtacaatttcatcctggaattgcaccgcgtacgtatttttaccgatttcgcccaaacctccgagggcgaaaacagcagtctgatcattttttacaaatttcataccgctcataactccaatactttaaaattttcgctctgttgttcatattctaagaatgcaccatcaacaggtgtaataaactcaatattaaatttcttttctttcagctttgttctgacgtcacgctcagatacgccttcaatataaagtgaatctgtcttttcccgaacaggtacttcgtcagccttctcttgataaaataccttataaatcattccaaatctctccttaaatgccgtatgttagactcgctcattctattatattcgaaaacggaatataaggaaagccttgagcaaaataaggatctctcaaaaagtgaaagatcccttgtcaggcaattgctttcttacggagcattccgttccattgtcttctgagtttctttcttaatttacgcagcattagccagtccctcctttaatgaaaaatttgtcccagagttcttttatacaaatagtatacggagattgaggaagacttttcgtggttattaatggaatttaatatgatttttgaacgaaattgtttgctgaatgacaatctttttgtatgatgagggtgggaattgcagaccaagacgataaaggggaagttgcgatggattctaaattaatcttttttgatattgacggcacaatatatgatcatgataagaatataccggaaagtacgagaaaaaccgtggcggagcttcagcgccaagggcatcatgtgtttattgccagcggccggtctccatttttggttaagccgattttggaggagctgggcatccactcatttatttcctacaatggacagtttgttgtctttgaaaatcaagtgatttataaaaatccgctgcctgaaaatgcaatcaggcgattattaaagcaggcggatgaaggcaagcatcctgttgtgtttatggctgaggacacgatgaaagcgactgttgcggatcacccccatgttctcgagggaatcggcagccttaaaacagattatccagagaccgatgaccttttttatgaaggaaaagaaatttttcagcttcttttattttgtcaggatgaagaagaaaaagcttatgccgcttttcctgagtttgatctagttcgctggcatgagctatcgactgatgttctgccgcacggaggttcgaaggcagaaggaatcaaaaaagtgattgagcgtcttccgtttgatatcggcgatacatatgctttcggcgacggattaaatgatttgcaaatgattgaatacgttgggacaggcgttgctatgggaaatgctgttcccgaactgaaagaaatcgcggactttgtaacaaaaccggtggacgaggatggaattgcatacgctgtcaaagaattgggccttttaaaataaagaaacggctggcattgtgccagccgttttctcttttagcgctcaattgcgattgcattttcaggttctttgaaaggattttccttatcaatatgatcatagaacataacgccgttcaaatgatcgatctcatgctgaaacacaatagccggaaatccttttaaacgaatatcaatattttcgccttctagtgttgttccttttactctgatgcgagcatagcggggaacataaccgggaatcgcttcatccacagagaggcagccctcgccgcttgttaagtagcttttttcaactgaatggctgacgatcttaggattaaacagagcatagctgtataatttaccggaagcatcttccgcatgaacggcgatcattcgttttttgatattaatttgaggagctgcgagtcctacgccagggcgcagcttgtatttttcggctaattctggattttggctgtttttaacaaattcgatcatgtcggccagctgctgtttttctgcatcagttggaggcagctcaacaggttcggcagtctctctgagggctggatggccgtcacgtacgatgttttccatagtaatcaagaaacttcactcctaaagcttaatatgtaaattatatcggatttcttcacaaaggtgcaacgaaacgaatgaccagccgtatatggctggtcaatttcatgctgtgtggttagcaacagcctccacctaaataagcagctccgacaatgattaacagaatgaataaaacaacgattagcgcaaaggtgcggccgtagccatatccgcagccaccatatccgtaaccaccataactgcagcagcctccgccgtaaccatatccatacatattacataacctcctcttttaattacgccagagcctttataagtaggcatagcgtctaatataacctatgtaaaaacaaaaaagttgtatggtcatctgtcctgatttttcacttttttgatttaatttcagtattgcatttatacagcacggctattgccaaatgtccccatggattctatagtagaaattgtcaagattgggggatttaacgtgaaagacgctataaaacggcggcctggaatcaagatcggagctttttgtgccatggcactgatattaacaggatgcatgggacaggacccggttgattcacttcatcattcattagaaaaagccgcggaatcggaaaagccgtttcaagaagaacaaaacacactcaaagaattagaggccaaagaaaatcagctttacgatagtgttatgaagctcaatatggatgattataaaaaaattgttgctttatctaataaggcgcttgaaaatgtcagcaagcgcgaagaacacctaaagcttgaaaatgacagcatgaaaaaatcggaaacagaatttgaggaagcaaaaacgtcagcggaacatattaaggaaaaagacataaaagaaaaggccgatgccgcagcaaaccatatggagaaaagatatacatcatatggcactatgtataaagagtataaaaaagcgcttgagcttaataaaaaactgtatatgcagctgaaagacaaagatttgacaagagatgatctggatcagcagatcgataaagtcaatgcttcttatgaaaagatccttaaatatagcggagaatttaatgaacaaaccgaaaaatataataaagcccgggaagatttatatgatgctgcaggctatcgtgtgaaaaagagctgactcgatcagctctttttttgaatgaaatgcgattcggatttcgttcaaaattttcatttctattgtagtacagcatagtaaggtatactagtacagttttgggtgcggttggcatctgtttttttgatgaaaatgtaaagcgaatacatttattgaaaatcagcgatgaaaacgattgacggttcttctttatttggtgtaaactaatccatgttaagcggtgttgtattagttttttacaacttcgaaataatacagttcaaagcagagtgtaactatcctacataaaaggttttggcaaactggggatcggctaaaatataatacgacttactgctgatactttagggtaccctaagtttgtatgtataaaaggaatgcacgtctaatgactgtttaaaagaaaggaagaggtgacttagtatggctgcaaaaacgaaaaaagctatcgttgacagtaagaagcaatttgatgccattaaaaagcagttcgaaacgttccaaattttaaatgaaaagggagaagtcgtgaatgaagcggcgatgcctgatttaactgatgatcaattaaaagagctaatgcgccgcatggtatttacgcgtgtgcttgaccaacgctctatctcattaaaccgtcaaggacgtctcggattttacgctcctactgcgggtcaagaagcttctcagattgcaacgcatttcgcgcttgaaaaagaagactttgttcttcctggataccgtgatgtgcctcagttaatttggcacggccttccattatatcaagcgtttcttttctctcgcggacatttcagaggaaaccaaatgcctgatgatgtgaatgccctttctccacaaatcattatcggtgctcaatacattcaaactgccggtgttgcgctaggtcttaaaaaacgcggtaagaaagctgtcgcaatcacttacactggtgacggcggagcttctcaaggggacttctacgaaggaattaactttgccggagcttataaagcacctgcaatcttcgtggtgcaaaacaaccgttacgcgatttcaactcctgttgaaaaacaatctgcagctgaaacaattgcacaaaaagctgtagctgccggtattgtcggcgtacaagtagacggaatggatccgcttgctgtatacgcagcaactgctgaagcacgcgagcgcgcaatcaacggcgaaggtccaacactaattgaaacacttacattccgttatggcccgcacacaatggctggtgacgatcctactaaatatcgtacaaaagaaatcgaaaatgagtgggaacaaaaagatccgcttgtacgtttccgtgcgttccttgaaaacaaaggcttatggtctgaagaagaagaagcaaaagtgattgaggatgcgaaagaagaaattaagcaagcgatcaaaaaagctgatgctgaaccgaagcaaaaagtaactgatttaatgaaaatcatgtacgaaaaaatgcctcacaaccttgaggagcaatttgaaatttatacacagaaggagtcgaagtaagccatggcgcaaatgacaatgattcaagcaatcacggatgcgttacgcacagaactgaaaaatgacgaaaatgtcttagttttcggagaagacgttggtgtaaacggcggcgtattccgtgcgacagaaggattgcaaaaagaattcggtgaagaccgtgtgtttgacacgccacttgctgaatctggtatcggcggtcttgcccttggtttaggcttaaacggcttccgtccggtaatggaaatccaattcttcggatttgtttatgaagtaatggattcagtttctggccaaatggctcgtatgcgctaccgttctggcggacgctggacttcacctgtaacaattcgttctccattcggcggcggtgttcatactcctgaacttcacgctgacagcttggaaggtcttgttgcacaacagcctggtatcaaagttgttattccatcaactccttacgatgccaaaggacttttaatttctgcgatcagagacaatgatcctgttgtcttcttagagcatatgaagctttaccgttctttccgtcaggaagttcctgaagaagaatacacaattgagcttggaaaagctgacgtgaaacgtgaaggtactgatctttcaatcatcacttacggcgcaatggttcatgaatcattaaaagctgctgatgagcttgaaaaagacggcatttctgctgaagttgtcgaccttcgtacagtaagcccacttgatatcgatacaattatcgcctctgtagaaaaaacaggacgcgcgattgtcgttcaagaggcacaaaaacaagccggtattgctgcaaacgtagtagcagaaattaatgaccgtgcgatcctgagcttggaagcacctgtacttcgcgttgcagcgccagatacagtatttcctttctctcaagcggagagcgtatggcttccaaaccataaagacgttcttgaaacagcaagaaaagtgcttgaattttaatcaaactgcataatcgagagggaagatgaacgttttccctctattatatatctgttttcaatgcttacgatgtaaactttaaaattgcttaatcaaactaggaggtcgagaactgtggcatttgaatttaaacttccagatatcggggaaggtatccacgaaggcgaaatcgtaaaatggtttgtcaagcctaacgacgaggtagacgaagatgatgtactggctgaagtccaaaatgataaagcagtagtagaaattccttcacctgttaaaggaaaagtattagaattaaaagttgaagagggaacggttgcaactgttggacaaacgattattacgtttgatgcacctggttacgaagatcttcaatttaaaggcagcgacgagtctgacgatgcgaaaactgaagcacaagttcagtcaactgcagaagctggacaagacgttgcgaaagaagagcaagctcaagagcctgcaaaagctactggcgcaggacagcaggatcaagctgaagttgacccgaacaaacgcgtgatcgctatgccttccgtacgtaaatatgcacgtgaaaaaggtgtagacatccgtaaggttactggttcaggcaacaacggacgtgttgtaaaagaagatatcgacagctttgtaaacggaggagcgcaagaagctgcaccgcaagaaacagctgcaccacaagaaacagctgctaaaccggctgctgcaccagctccagagggcgaattcccagaaacacgcgaaaaaatgagcggtatccgtaaagcaattgcaaaagcgatggttaactctaaacacactgctcctcacgtaacgttaatggacgaagtggacgtaacaaaccttgttgcacatcgtaaacagttcaaacaggttgctgctgatcaaggaatcaagctgacttacttgccttacgttgtaaaagctcttacatctgcactgaaaaaattccctgttttaaacacgtcaattgacgataaaacagatgaagtcatccaaaaacattacttcaacatcggtatcgctgctgacactgaaaaaggcttgcttgtaccggttgtgaaaaatgcagatcgtaaatctgtctttgaaatttctgatgaaatcaatggccttgcaacaaaagctcgtgaaggcaagcttgctccagctgaaatgaaaggcgcatcttgcacaattacaaacatcggttctgccggcggacaatggttcactccggttatcaaccatccagaagttgcgattcttggtatcggacgcattgcagaaaaagcgattgttcgtgatggcgaaatcgtagcagctccagtcttagctctttctctcagcttcgaccaccgtatgatcgacggagcaactgcgcaaaatgcattaaatcacatcaagcgtttactgaacgatccacaattaattttaatggaggcgtaatgttatggtagtaggagatttccctattgaaacagatactcttgtaattggtgcgggacctggcggctatgtagctgccatccgcgctgcacagcttggacaaaaagtaacagtcgttgaaaaagcaactcttggaggcgtttgtctgaacgttggatgtatcccttcaaaagcgctgatcaatgcaggtcaccgttatgagaatgcaaaacattctgatgacatgggaatcactgctgagaatgtaacagttgatttcacaaaagttcaagaatggaaagcttctgttgtcaacaagcttactggcggtgtagcaggtcttcttaaaggcaacaaagtagatgttgtaaaaggtgaagcttactttgtagacagcaattcagttcgtgttatggatgagaactctgctcaaacatacacgtttaaaaacgcaatcattgctactggttctcgtcctatcgaattgccaaacttcaaatatagtgagcgtgtcctgaattcaactggcgctttggctcttaaagaaattcctaaaaagctcgttgttatcggcggcggatacatcggaactgaacttggaactgcgtatgctaacttcggtactgaacttgttattcttgaaggcggagatgaaattcttcctggcttcgaaaaacaaatgagttctctcgttacacgcagactgaagaaaaaaggcaacgttgaaatccatacaaacgcgatggctaaaggcgttgaagaaagaccagacggcgtaacagttactttcgaagtaaaaggcgaagaaaaaactgttgatgctgattacgtattgattacagtaggacgccgtccaaacactgatgagcttggtcttgagcaagtcggtatcgaaatgacggaccgcggtatcgtgaaaactgacaaacagtgccgcacaaacgtacctaacatttatgcaatcggtgatatcatcgaaggaccgccgcttgctcataaagcatcttacgaaggtaaaatcgctgcagaagctatcgctggagagcctgcagaaatcgattaccttggtattcctgcggttgttttctctgagcctgaacttgcatcagttggttacactgaagcacaggcgaaagaagaaggtcttgacattgttgctgctaaattcccatttgcagcaaacggccgcgcgctttctcttaacgaaacagacggcttcatgaagctgatcactcgtaaagaggacggtcttgtgatcggtgcgcaaatcgccggagcaagtgcttctgatatgatttctgaattaagcttagcgattgaaggcggcatgactgctgaagatatcgcaatgacaattcacgctcacccaacattgggcgaaatcacaatggaagctgctgaagtggcaatcggaagtccgattcacatcgtaaaataattttcatatcaaaaacagccccgctttgagcgagggctgtttttttattttgacagcacatgctgtaatggtttaatgatgtcttctttctttttcacacatccctcgattttcaccacgacatggcgctgatcaacaaccataagggtagggacagtttcaatctcatcttcccagccttcttttttatcatagaccttcattttatctatttgctcgggataatctttttctaaatcaagcagtgcatcgtaataaggcgcttcctggtctatttggttctcatcagaaaaaaacaggatttgtgtatgatgaatgttgtcaatccggctttttttcatcggattgatggtggaaagcgtacagcccgataaagcaaatactattatcagcatggggaataccgcgcgatatcgcatctatcttctcctctgtataaacagtagttaactagctttagtttatcacgagagacggcttaatctgcttcttgttacctaattgttatataattgaaaccgtttttaaagtgagattacatattatatcaatcgtttaaaatagcaacctggggtatattgaattttttgctgcattcttggatgaaagttcaagaaaacgtgcaattacattatgtgctgtggcatatatatcgagtaaagcttctgtatgaagaagatattgtatgatggaaaatggaaaaacaaggtgaatatgatgatatgaaataaaatgtgttatacagtttgttgttgacattttaaatgtgacatattaatataataacaacaaaagaaattaagcgttttcaaatttcaaagaaatggggaataagagatgggtacgattgtttgccaagattgcaacgaagccattcattactttgaagatgagaaagtgacaacattatatggaacttgctgcggacaatgtcaatgtcctgttgatgaagagtaaaaaaaagcatgcggcttaaagccgcatgctttttattttttattgaattgctttttgttctttgatgacccggatcatatgtaaagtcgagtcctcaggtccttgaacagggaggcctgcgtcaaggtttttaaaaatgtagctgatgttttcttctgtaataatttctcctgggatgaagattggaataccaggcggatataccatgacaaattcagcaataatccgtccggatgcttcttttaatgggatgacttccgtatttgcatagaaagcatcacgcggagtcattgccaataaaggtatttctggaagcagaacctcagtttgctgatgtgttacatcttgttctgacatttgctgtgcgatctcagttaaagcctctacaagccggtctgcatcattttggctgtcaccaggagtgaaaatacacaaaatattgtacagatcagaaagctccacctcaatattaaaggattcacgaagccatttttccacgtcatgtcctgtcaggccaagacttttcacagagataatcaattttgtcggatcatagctgtaagctgctttcgacccaagaatctcagaaccgacacaataaatgccttcaatctgattgaggcgatctctcgtctgattggcaagcttgagtgtttcctcagcaagctggcggccttctgttgcaaggcgttttctggcaacatccaaagaagcgagaagcaagtaagaagttgacgtagttgtcagcatgctcaggatggattgcactctgtctttagatacaaggccttctctcatgtttaaaatagagctttgtgtcagtgatccgcccagcttgtgtacacttgtcgctgctatgtccgctcctgcctgcatagccgatagcggcaattcgtcgtgaaaatgaatgtgaacgccgtgtgcttcatccacaagcactggcacatcaaacgaatgagcgagttctacgatgctttttaagtcggctgcaacaccgaaatatgtcgggttgatgacgagaagcccttttgcatccggatgctcggtaagcgcccgtttagcagattcaagtgtaattccgtgggagatgcccaattcattgtcaatttcaggatgaataaaaattggaaccgctccggaaaatacaatagctgtcataattgatttatgaacatttcttggaataataattttatcaccaggtccgcaaacagccattaccattgtcataatggcgccgcttgttccttgaacagaaaaaaatgtatgatccgctccaaatgcttcagcagccagatcttgtgcttgtttaataatgccttttggcgcgtgcagatcgtctaatggttcaatattaatcaaatctatgcttaacgcgttttcaccgataaattgtctgaattctgggtccattcctgccccttttttatggccgggaatgtggaattgaacaggctgtctgcttgcatgctttttcagtcctgtgtataagggtgtttcatgttgcgacaattgttttcccacctttgtaatcatacctatgcataatagtgtgtattaaaatcagtttctcaaccgttttttagacgtaaaacaaatgaattatattatgaacttgaaagaatgtaaagaacaatttatgatcaaatgaagatgctttctcttaagggaagtaaatctacaaggagtgaagaaaatggagtatcaatatccgatgaatgaagattggacaaccgaagaagcagtggatgtgattgcatttttccagcaggttgagcttgcatatgaaaaaggggcggatcgtgaagaactgcttaaagcttaccgccgtttcaaggaaattgtaccggggaaggccgaagaaaaaaagctatgcggcgagtttgaggaacaaagtacatattctccttatcgcacggtcaaacaggcgagagaatctgatcacgcgaagattaagatgtaagaaaaagagccgggggatatcccggctcttttttatgcttgtgttactttttgggtgagacggtacagaaaagcaagctgtttaaaggcatcgtcgatacgctgaaggaattcctggttattcatattcagcacttcttctttttggagctggatgccgcataacagctcggctttctttacagtctgcaaacgctcaaacagtgtcttcagctgttccttgtccatttcagactgtttatgtactcccggttttgtgtgatctgcagaccaaacgaagctgtcagggatatttttcgtaatggtttcttggttcacttcaagcaatttgccgtattcttctttgataggggattcataaataatcgcgaaccatacaaagacgtggctttcccataaaccaatttggaaatgcggcagttttttatagcctcttttgctgtttgcgaacgccacccagctgtcagccgggggattgacggatcttcttgcgtgctttgccacatgcggaaacatttcatctccggttaaagctgataaagttggggcaaaatgttcgcctagagctgtaagcttcggacggaccgtctcttttaatacttccatgcgcgcgtctaagccttctattgtaaatgtgttaaagtcttcttcagtgaaacgcatttgtgtcatgattttcctccttcatgctaagtatacatattttatcacagttcatacgagcttcaaaaagattgagcgcgtttgaagtaaggagaaatgtggtaataaacgagtaggtaaacacacaattttcagaatcatgttgcgcgtaaatagaacaatcatacgatataagaagtaatcattgttgaatggcaaaatgggatgcttttttacaaacaaatgatctctggaaggggcgaaagacaatgaggcaagttgtaaaagagggatttaaggaagagaaaaacaatcgtgttgctgtctggagactagaggttgattatgaattggcaaccctatatgaagcaatgcagaaagaaaatgaagagcagattgaacaaagcaaaaacaaacttgagcgacttagaaaagaatggattcgtcttaacgggtaaaaaagcgatagtgaaaacgaaccgcatgaatggttcgtttttacgtgagaagggatatttttcattttccttgctttttcattgccgttatcagtatcctataaaataaaaggtctacatagaagagaggtacgaacgaatgacaaattggacggaaatcgatgagattgcaaagaaatggataagagaagcaggcgcgagaattacacaatccatgcatgaaagcctgacaattgaaacgaaatcaaatccgaatgatttagtcaccaatattgacaaagaaaccgaaaagtttttcattgatcgaattcaagaaacatttccgggacatcggatactcggtgaagaggggcaaggagacaaaatccactcacttgagggagtcgtatggattattgatccgattgatgggacgatgaattttgtgcaccagcaaagaaattttgcgatttccattgggatttttgaaaacggtgaaggtaaaatcggtttaatttatgatgtggtgcacgatgagttgtatcacgcatttagcggcagaggagcttatatgaatgaaacgaagctggctccattaaaagaaaccgtcattgaagaagcgattcttgccattaatgcaacatgggtaacggaaaacagaagaattgatcaaagtgtgttagcgccacttgtgaaaagagtcagaggcacacgctcctacggttctgccgctttagagctggcaaatgtcgcggcaggaagaatagatgcttacatcacgatgcggcttgcgccatgggactacgcagccggctgtgtgctgttaaatgaagtaggaggcacctatacgaccattgaaggagagccgtttacctttttagaaaaccacagtgtgctagccggaaacccatctatacataaaacgatatttgaagagtatcttcatgctcggaagtaggccatttgagcaggatgatctcagcttgttagaaaagctcgcggaggctcatcctgtatggaaagaggaggagtttggagataaagatgcagaagactatatcatttcctactccatgtacaacggttcatggcttgtatgggaaaaagacggtatgcctgttgccgtcagctaccatctcgagtggtctccttcaaacggtaagccgtggctcggaacggtcctgattgacccggctgaagaaaaaaagggacatgcgaagatgatcattgaacagatcagcaaattgcttagagcgaaacataaagcgatgtttgcgggagttcccattgagcgcagggaatggatactgtttttaagccaatgcggctttgaacagctgaaaacggaaaaagatgagaaaggcaaatcatttatgatcttggtgaagcctttagcagaagctgccgtatgataatggcagcttatttgctgcatgcgggttcaataaaaagcctctcaaacattgagaggcttctgatgatttgaaaattatttttttaccgcatgaatataatgaatcgtttcaaacgctgacaaattgtcttttcgattactaaagaaaaggtcattgatgtcgtctggtgatagatgttcatagatcagtaaaccagatgactctaacagatgttcaatctcttgataagtgaaacatgatttcatcggttccccgcttgcggcagccatcttcaccatatgttcaactcgattcgacgtcccttttgctgtaaaaagtgtttcgtccgcataatcaaaaacaatagagcttccaggcgggacatgagaaaataaattgctgatcaagcttgcattttcttcccgtgttacataataagacactccgagaaggctgaagaatgtttttgtgtttttaaatccttcatctaagagaggatcatacgaaaacgttttggtgaaatccataggaacaaaatgaagatgacccggaattgtcagatttgcatccttcagcttattttttttcaattgctgtgtggccggatgatcaacctcgaaaacctgtaagctgttttctaattctggatgccgaaagcagaaagtatccagtcccgctccaagaatgacatactgttttgcccccaggattaattcgttgtgcaagactttttcacaataagaagcacgtgctaggggcgttggagacagctggatttgtgcaacccattttaatattttttcaggatcattttgaagacgttcggcgatctctttgttgaaaaacgatatttcttgaatcatatttttactgatgtcgataaactctttttcgttaatgagatcttttgcgataaaatcatcaaaaataagaggtgtgtcatatcggctgtgatatgcacgggcaaaagctgaaattagagacgttaagctggactcatttttcctcatgaaatgatcctccacaaaaaataagattcccctggccaggagaatcttattatacatacaaatatattaatagtaaattttagcataaataaatttttttgtcaatgtttttgctcttaactggacgcgcgatccttcacatagccacgtgacctgtagcagaattcgtctatcaattatgtggactgaatcattagcttttataaaatgcgcacttgcggctgcatccctctttatgcaaatcaggagcggttttctgtctcatggcagcatcttttcgtcgtttcagctgagagagaaatcaagatatgtaacaataaaagcctgagggatctcaggcttttcctaatattacaatccaacagcattccaggctgcttcaactttagcggcatcagttgagccgtagaggtcacgggcagactgaatgagagctgccttggcatctttgaacgtggaagaaggcgtgaggtacgttgttaacgcacggtaatagatttgctgtgatttagatacaccaagttttgtgatggtgttgtaagcggctttgtttggaattccgctgtttgtgtgtacaccgccataatcgccttcatctgtgtttggaaggtttcggtaattggcgtaattgtcaggctggttgtattttgtagggttggacaggctgcgaagagcaggctggctgaccgtaatgtcttcaccgatgtcccagtcttctgtatcgttaaaatacccgaatacgtcagagaaagactcgtttaatgcacctggctgattttcataaatcaagttggctgtttcttgggtgacgccatgtgtcatttcatgcgctgtcacatctaatgagccggaaagcggagagaagaatgaaccgtcgccatcaccgtaaatcatctggtctcctgtccatgcagcgttattgtattgagtgccgtagtgaacggaagaaacgattttactgcctttgttatcatagctgtttcgtttaaagtttgaataaaaataatcgtacactttaccgaggttatagtgtgcgtcaacggctgcccgctgtgatgaagatgtaaatgttttcgttgtgcttgagacaagcgtgcccggaaggcggctttgtctgttttgcaaatcatatgtgatgatttgggtgcctgttggttttgaaagatctcttagaacatattttccgccttcataagagatgttcaaaggaacagttgcgccctttagcgttgttccgcttccagtggcggcggcatgttctactttattttgctgttttaaaatgctgcctgtttcggcgtcaactaagacttcccagtttgcaggttcaggctcgacatagcgaatcgtcacgtcgtaagcaagacgatagctgccgtcttttgtttctatcgcttttaattcggctttattgctgtttttggccgctccgttagaaacagcgtctggtgatttgccgatagctttgaaagcgagtgccagcgctttttcagaagagactttttggctgttatctgtttttgcagcagattgattgtgtaattcaccattgaccgcatagacattatcggatttatcgacgtgaacgatcacttgcgaatctttaattggcactccgttaacgacaggcgcatatcgaaagtgcttgtatccaagggcatcagtcgtgctttcaacaagcttcagccttttggaagggtcacctttaaaaatgttgctgttctttttcaaaaactgcttgacagccttgtcatttggtgcagagagttctgattgcgcaatcgcgtttttggagaggaaatttgtttgattctctttaagctgatgaccttcagcagcctgaacacctggcaggctgattgataaactcataaacgaagcagcgacagcaacagacaatttcttacctaaacccacaataaatccccctttttgaaaatactgaaaactttatattgttatattaaactagcattctggaatactcaacaaaaactaacataactagacaaaattgatagtattgtcctgtgtttgtttttgttgaataatatcaagatgagtcaagtgtcatgtggtggttcattcaagagttatgttttttacatatcaaggggaagatgagatatttttgtttcatcttgaaactttttgaaaagtccgctgtctaaccgaatgaggccttaataagaagtaaaggattgttgttcgtgttggagttattcagtcattatgtattgcatttcgaacgttattttatattaagcagacaaagcaccctgctgattcaatggtcaattgttgttctggcgggcttatatcttttggtgcatcatcccaaaataaaccggcagcgcacaatgttcttggcgggtgttatattgcggattgtgctgctggcgggagtgtctgttgaacttattcaccaggtgcaatcaacaaacttcaccagcgcttacttaagagaggacggaaaagaactgctgccgctgctgcattttttgttatacggatatgtgctgctgacggcttttcactatatgctgatgccgcgtgatcatggcggaaagggtaagttttatacgttcgaccttgctgttgtcagtttgccgatcgtacaaatgatttttagtttcttttcgtattggaaggaatacccggatgggatggagccgattgcattcgtgtttctgtttttcatcatcactcttcccattgcgttgaatgtagtgtttttcaagctgtattggagaacggataagatcttactaggcttattttatacgctgattatcggactgcttgtcttgctgcttgcgccatatcccaatcaaatctcaaaagattatggtgcagtaatgccatatacgatttatttggcaatggcgggatttttgatgagctatcatctgttccaaaagtcaggaaaggtttatgtgcgtgtgaataagtgggtgacgatggctgtcatggtgttttttgtcctgctgttaaatccgatatataacataggaacggctgctttcgctgtatcaaagccagcaaatgtccatgattcattcaattttgtcggggagcacatttcatcagaaaaagcggaacagatactaaagtcattttttcctacggatgaaacactttatttgcacgatacaaacatggatgtgcattatttctactcatttgaaagcaaaggttacaaagctgaggtagatgaagtatcgcagctaattcgtaattatgaatacttacaaaaagcacatgggaaaaagctaacgaatcaggagtacaagcgaaagtccatcgctttccttgagcgacacggacgtgtgttacataaggatcatatcgaaacaaaggtatctcaagaagacggccagacagtcgtacgtatttacctgaaaaatcaacttcataaaaaagatcatgctgatgatggcgcggtattttattgggaaaaggaaaccttaatggggtttagtgaagatccttcgatttatcagcttgactctcttctgcatgttcatataacggaacaagacattcacgacaaagtggaacaaatgtttacagcgctgaacatatcaaaacagccttatcagatcactgatattgaaagcgacagcctgcttggaagcatggtgagagttgaaacaaaagttggaattgttttggaatttgagggcgaatcaggttgtttacatagtctttcgcttccgatgaaaaagaatatctcaatggctaacagccggctgcagcatcagatattatcgatcttcgatgctcgtggatcagaaaagaagaaaaaaagcagtcagggtgacatggtgatgtatactgattcttctaaaacatatgagtttgttgaagctcaaggtcagctaaacgtttatgtatacagcgatacacctgatcagtcattcccctatacgtatcgtaatggaacattggcttacgaaaaagtagcttctctatatcaggatgtcatttacaaaaagcgtatgcgtccgattatcgttcaaagaggggatgaacggcattatgcatggctgatcattattcagccgtttggttcaaatcgccatgatgcctatgtagtggatggagaaacacaagaggtgaaaagtctttatgaatcataaagaaaaagagtctgtttttgtagacttatacgacctgtataaagaaggagagctagaggatgaatcaatggaatggatgaaacagcatgaatccctatttcaaaagaatgcggaagacttaaagagtaaaacttgtttaaagagaagtcccggtgctgaagaagaaagccaaatcagatatatgaaagtatacctgtcttccatgtatatctgtttcattttattggccatttggatgacggtgtggttttatttttaatgaagcatagggattccattgaggacttgtatcggcagtattatcaagaaattttaaattatttattcagaaggactcatcatcttgaaacagccaaggacttagcgcaggacacgtttgtaaaagctcttaacggtctggcttcgtttagggggcattcttccatcagaacatggctctacaccattgcgcatcatacctttatcaattggtaccgaagggatgtcaaataccaatttactgaaatcagcaaaaatgaagggttaacgcaaacaacttatgaccagcctgaacagtatctgtcacggacggtgaaaagcgaaacactgcggcaggagctcctgaagttaaaagatcagcatcaatccgttttgattttaagagaattccaagagctttcttatgaagaaatcgctgagatattaggatggagtctttctaaggtgaataccacattgcaccgggctagattagagctaaagaaaaacatgacgaaaagtagagaggaggagcggatatgacctgctttctagtaagagacctgcttcctctgtatcttgaaggtgattgtaaaagagaaacggaacacgttatagaagagcatttaaaaatgtgcagcagctgcagagacatgtatgacacgatggctgagccatttgaattggaaagcgaacaggccgttgaggaggcttatctgccggaagaagaactgcgttttaaacagaggtactatggattactgatcatgaaagctgcctgctggtttggagcggcggttgccatgatgctgatcatcaaactgctgatataaaaaaagcgcttgtccgattccggcaagcgcttttttacattaagcctggggatgaatcatatcgtaaatagcggcaagctgttcttgtgacagggcactgaagagtttttcataaacgtcagcttgcagtggcgttgcacctgcttgtagcgctgcgtctttatcatagctgtacacatcatcttgtagcacaatggctgcttgaagaatgtgaatcttgagagaaacagcggagaaaaattgttcaagtgcaagtgcttctttttctgtgaagccaagttcaactgctttttctgtatcaaatttgtaatttccatcctcgagatacacacattgtgaaacaatgctgaaaaattctgatgtcgattcccagagtgtagcaattacctgagcctcttcttttgtcattcctaactcgacagctttttcgctgtcaaaataatatacaccgtcttgttcgtatatacattgatttaatatatcaatgaatgtattgagatcttcgttagtgctcgcctgatgctggagttgaacagcagtgttatcaaccggtgtttttgcgctggctgcatcaggaccgaacgttaatagagcagctgaggtcattgcggcagtcgttaacatagctttttttacaaatgttttcttcatgtttcttctctcccttttatgaattgtgctacaaattccattatagggagtagtttccggtggaggaataggcgctatggtattttatgtgtatcgttgccgaactactttttgaaggctgcacgtgtgatcgttagaacgattgtctatgtatgaaggctgttttgcatcttcctgactaagaaacaggggagataaggcttaaagaaatgaaaaacaccgctttctttgcggtgttttttgattacaatgtcgccggcggggcaatgcttttaatcaagcaagccttgttcgcgcattttcttttttaatgtaaatccgccgcccatgacagcgcaaacaagtacaatgctggcgataatgcctgcagggcttttttcagcgataaagacgccgatcagcataatgctgaaaaccgctgcaaatgcaaataatagtaaaagccaattcatttttttcataaattccatccccttttacgtcttatattaagtttacagaaaaacgtgacgcttttaaagaggatgtgtgatataatatgaaagttatctaatttttttaggagatgaaaaagtgaaacttcgaaatgatcttcgcaacatcgcgattattgcccacgttgaccatgggaaaacgactctagtcgatcagcttttacatcaggctggtacgttccgtgccaacgaacaggttgctgaacgcgcaatggactctaatgatcttgaacgcgaacgcggcattacaatattggcgaaaaatactgcgattaactataaagatacacgtatcaatattttggacacccctggacatgcagactttgggggagaagtagaacggattatgaaaatggttgacggcgtagtgcttgtcgttgacgcatatgaaggctgtatgcctcaaactcgttttgttctgaaaaaagctcttgagcaaaacctgaaccctgttgttgttgtaaacaaaattgaccgtgactttgctcgtccagaggaagttatcgatgaagttctggatctgttcattgagcttgatgccaatgaagagcagctcgagttcccagtggtatatgcttccgcgattaatggaacagcgagtcttgatccgaaacaacaggatgaaaacatggaagctttatatgaaaccattattaagcatgttccggcacctgttgataatgcagaggagccgcttcaattccaagttgcccttcttgactacaacgactatgtaggccgtatcggaatcggacgcgtattccgcggcacaatgaaagtcggacagcaggtttctcttatgaagcttgacggaacggcaaagtcattccgtgttacaaagatttttggtttccaaggcttaaagcgtgtggaaattgaagaagcaaaagcgggagacctcgttgcggtttccgggatggaagatatcaacgttggtgaaacggtatgtcctgtagaccatcaagatccgcttccggtccttcgcattgatgagccgacacttcaaatgacatttgtcgtgaataacagtccgtttgcaggccgtgaaggcaaatatgtaacggcccgcaaaatcgaagagcgtcttcaatcacagcttcagacggatgtgagcttgcgtgttgagccaacagcttctcctgatgcttgggttgtttcaggacgcggtgagctgcacttgtcaattttaattgaaaatatgcgtcgtgagggctatgagcttcaagtgtcaaaacctgaagttattatcaaagaaatcgacggcgtacgctgtgagcctgttgaacgtgtgcaaattgatgttcctgaagagcatactggctctgtaatggaatcaatgggtgcccgcaaaggcgaaatggttgatatgatcaacaacggaaacggccaagtccgtctcatctttacagttccttcccgcggattgatcggttactctacagaattcctatcattaacacgcggattcggtattttgaaccatacgtttgacagctaccagccgatgcaggcaggccaagtcggcggacgccgtcaaggtgtacttgtgtcaatggaaaacggaaaagcaacatcatacggtattcaaggaattgaagaccgcggtgtcatcttcgttgagccgggtactgaagtatacgaaggaatgatcgttggagagcataaccgtgacaacgaccttgttgttaacgtcagcaaaatgaaacagcaaacaaacgtccgttctgcgacaaaggatcagacaactacaattaaaaaagcgcgcatcatgtctcttgaggagtctctagagtacttaaacgaagatgaatattgtgaagtaacacctgaatccatccgtttaagaaagaagatcctcaataagaacgaacgtgaaaaagcagctaaaaagaaaaaaacagcaggattgtcttaatctcgtgcagaatttgaaaagatagaacccgtacgtttacaggggagggaatctttttgaatgacgtaagcgaacgcctgtcgttcttcgccgctctatatcaagtagaccggcagcctgcggcaggcatgtggctgctgtacggcacgatttttgtgttggccgttattgtatttaagcttggatttgctaaacggcttcctgtattaaaatctgcagtggtgtatgtatttttggctttgggctgcactgttttgacttttttaggggtgtttttgcccgtggcagaaggattggtcgtcgctgcgctgattttaatcatttacaaaatccggctgtatcagtcgaaaaaaggacagtctgcaaaatcataaaagactcagctgaaagctgagtcttttttgtgttctgtatggttaagcggccgctttattttttgactttttcttttttctgctgtcccgggtgaaaagtaaattttcccgttttcagccgttcctctgtttttttggcaatccgatcgtggcattcctggcacatatatgtatggatcgggcggtttcgaagccgtttcgcgatcagggtatcatcatcaattgtttcaattttatcgcaaatagaacatttgaccctcatcatatcacctctttcactaacatgtattataccacggatcagaagctgtccaaaataagaaaaagctaaagcgcaaggctatagcttagtcattgttgttctttttcatatgatgatcagattgatcgttttgttccttctccatttcctgttgctgttttctatttaattggtcattttgctgctttgtttgcggttcatcttcattgtcaatcacatcgttaggcacttcgggaagcactcggccgacaattgcagctaattcatccagtatacctgttaccggatggccctcgctgatttctctgctcatttcgcgaaggcggctgaccgtatcgggatcagcaatgactactgcgttggcgccatatcgatcattctttagcgcctgagctacagaatatttaatggtttccactttgcttctgtccaaagtatcatcgacatcaatcccaacaacagcatagcctcccagcacaacggctgttgcatccttgacgtcggggtttttttcagcaacgctgacaagatgcttggcaatatccgttcttgttccattgtcttttgtttcttgagttgtgtcctttacgtgaatcggtttagtctcctgctgtcttgttgattctttttcaacattctggccctgttttccttgttgataggcacaagcggacaggataagtgtcagctgtatgataatgaaaagaattcgcacttgcgggttccctccttaaaatgctttcattaattttattgttgaattaaccttctatctttatgcacaaaaacatatattttagcaggcattcacctttttcatcaaaagagaagcaggaagaactttgacccttatatcaggaggctgagacttgagtaaaatttatgtgttagatacgaatgtgttattacaggatcctaacgcgatattttcttttgaagaaaatgaggttgtcatccctgctgtcgttttagaagaggttgattcaaaaaaacggtatatggacgaagttgggaggaatgcaaggcacgtatctaagctaatcgatgcgctaagacaaaagggcaggctgcatgagcatgtaccgcttgacaccggcggcacactgagaattgaactgaatcatcgttcgtttcaccagctgcaagagatctttattgaaaagacgaacgataatcgcatattagccgttgcgaaaaacttaagcctcgaggaagaaaccaaggaaaatggcaggccggttatccttgtcagtaaggatgtactggtcagggttaaagccgacgcaatcggactgcttgctgaagatttcttgaatgaccgggttgtggacaatgatgaaatgtacagcggctataaagatttatatatcagccagcagctgttcagctctttttacgggaaaaatcaaatttcagtaaacgatgtgaaacagcatgcgttttatccgaatcagtttgctttaatgaaggatgagctaggagggtcctcctcggcagtcggaattgcagacaaaaccggaacggtattaaaaagactcgtatttgatgatgaacatatatggggaatcaggccgaaaaatgtacagcagacaatggcattagagcttttgctgcgggaagatattccgcttgtcaccctgatcggcaaagcgggaaccggcaaaacgctcttagctttggcggcagggctattacagacagaagacttgggaatatataaaaagctggtcgtcgcaaggccgattgttcctgttggcaaggacatcgggtatttgccaggcgaaaaagaggaaaagctaaagccttggatgcagccgatttttgacaacttagagtttctgtttaatgcgaaaaaaccaggggagcttgatgctattttggcgggaattggctcaattcaggtagaggcgctgacttatatcagagggagaagcattccagatcaatttattatcattgatgaagcgcaaaatttgaccaggcatgaggtgaaaacgttgctgacgagagtcggtgagggcagtaaaattgtcttaatgggcgaccctgaacaaattgatcacccatatttagacagtctgaacaatggtttggcctatgtggttgagcggtttaaaggacaacccatctcaggcagcgtgaagctgttaaaaggtgagagatcaggtctcgcccagcttgcagctgatttgctgtaacacttaaatgatttcgatctcttttacatcggtaatcggctgtttgtgatgaaccgggtcttcaaagtaaatatgcacggggccgccttcttgaatcggcttgcctgcctcactgaaatggacaatactgttcagagcggtttccagagaaacggcggcctttcccgaacttgtgacaaatacacattgtgtcgcagagctgttcggctcagcatttttcaggacagtcccaagtctcattgcgaaactgccgttcatcagtttttgcttctcatattgcttttccgtctttaatgtaggcggcgcgattcgcccctctctgatgacgcgttccggatcaaggtcggattcatccccggctgattgtaaatatgtgtcttgactgtcccctttgcggtcaaacgaaaatttgcgatcatcaaaaatccatacgcttggatcaatggtaattggatatgtaacattgccttttacttggataacgctcatgatatgacccccttctctcaaaattataaaagttttcgcatgaattgtcactttgtgtacaaattatgtgtattgaaatgctgagggaacgagggtgtttgcatggtatgccagcataatgatgagcttgaagccttagtgaaaaaggcgaaaaaagtaacggacaagggggaggtagccagctatattcccgccttggcaaaagctgataaacacgacctgtcagtggcgatttattattccaataatgtttgtctgtcagcaggtgacgtagaaaaaacatttacgcttcaaagtatatcgaaagtcctttcccttgctttggtgttaatggaatacggcaaagataaggtcttcagttatgttggacaggagccgaccggtgatccgtttaattcaattatcaagctcgaaacagtgaatccgagcaagccgttaaaccctatgattaatgccggggcattggtagtgacaagtctgataaggggaagaacggtaaaagagagacttgattatttgctttcttttatcagaaggctgacaaacaaccaagagattacatactgccgggaagtggctgaatctgaatacagcacttcaatgattaatcgggcgatgtgttattatatgaagcagtacggcatttttgaagatgatgtagaggcagtaatggatttatatacgaagcaatgcgcgattgagatgaacagcttggatttagcgaaaatcggatctgtattcgcattgaacggcagacatccagagactggggagcaggtcatctcaaaagatgtcgctagaatttgcaaaacgtttatggtgacgtgcggaatgtacaatgcaagcggggaattcgcaattaaggtcggaattcctgcgaaaagcggcgtatccggcgggataatgggcatttcgccttacgatttcgggatcggcatattcggccccgcattagacgaaaaagggaacagcattgcaggtgtaaagcttttggaaataatgtctgagatgtacaggctgagtattttttaatttatgtcatatgcttaaatcctcttgcattttctgttgataccctttatgataaatagaagaattaggtactcgcctggggaacggagggatacttttggcttcagagatgatagttgaccatcggcaaaaagcttttgaactcttaaaagtggacgctgagaagattttgaagctgatccgagtacaaatggataacttaacgatgcctcaatgtcctctatatgaagaggttttagatactcaaatgttcgggctttcgagggaaatcgattttgctgtccgcctgggattggttgatgaaaaagacggtaaagaccttttatacacattggagcgcgaattgtctgctttgcatgacgcgtttacagctaaataaatgataaaactcaaacttattaacagtttgggtttttttataaccgctatttttctctcatctcataaaagacggtctttttttacacattccttccgaatcgtatagagattcttcgtctcgtttgataaattgtagtaaaataaaaaagataaatacataaaaaccatagataatggaagttagaagcagggaagaggatgttatgttaaaaaaaatgctaaaatcttatgattactcactgatattcgcaatcgttttattatgcggattcggtttagtgatggtatacagctcaagcatgattacggctgtctcccggtatggagtaagcagtaattttttcttcatgcggcagctgtttgctttaattgcgggtggcgctctatttattctcatggcgttgtttccttataaagcactggcccatcaaaagtttcagaaggggatactgcttgtatctgttcttgcgcttatctcactgtttgttttcgggcatgttgccggaaacgcgcagagctggtttaaaatcggcggaatgagtattcagccgggggagtttgtgaaactggtcgtgattttataccttgcagccgtatatgcaaaaaaacaaagttatatcgaccatctgttaacgggagtagcccctccggtagtcatgacgcttataatttgtgggttaattgccatgcagccagatttcggtacagccatgattatagggttaattgcgacgtgcatgatcttgtgctccggcttcagcggaaagacgctggtgaggcttgtgatactgggcggaattgttttcattttagtcagccctattatctatttgaatcaggacaaaattttaactgaaggccgtttagcgcgttttgagagtcttgaagacccatttaagtatgcaaattcatcaggtttgcaagtgatcaattcttattatgcgatcagctcaggcggcattttcggcctggggctcggtgaaagtatccaaaaatacggatatctgcctgaatcacacactgactttattatggctgtcattgctgaagagctcggcatttttggggtattgtttgtgattttcttattgggttttgtcgtcataaaaggtttttatattgccagaaaatgcgaggacccgtttggaagtcttctggcgatcggcatttcaagcatgattgccatccagtcgtttattaaccttggcggtgtcagcggattaattccgattacaggggttacgctgccatttatcagttacgggggctcttctttggtgctgctgctggggagtatggggatattagcgaatatcagcatgtttgtgaaatattcagagaataagaaaaagaaagagcccttggcgccgaagggaatgaaaaagaaacagctcaaaaaaactgtttatctgtaaaaaacaagtgtgtacaggggaaggatattccgctatgatagattatattccattcgggtaagggggagaaaagtttgtctcagcaatcgatacaaaaagtattagtagcaaacaggggagaaattgcaatccgaatattccgggcgtgtaccgagttgaatattcgtacagttgcggtctattcaaaagaagattccggttcctaccatcggtacaaagcggatgaagcatacttggtcggtgaagggaaaaaaccgattgatgcttacctggatattgaaggtatcattgatattgcgaaaagaaacaaagtcgatgcaattcatccgggatacggtttcttatctgaaaatattcattttgcgagacgatgtgaagaagaaggcatcgtattcatagggccaaaatccgagcatctcgatatgtttggtgacaaggtaaaagcgcgtgagcaggcagaaaaagcgggaatccccgtgattccgggaagcgacggtcctgccgaaacgcttgaagccgtcgaacaatttggacaagctaacggttatccgatcatcattaaagcctcgcttggcggcggcggccgcggtatgcggattgtcagatctgaaagtgaagttaaagaagcatatgagcgtgctaaatcagaggcgaaagcagcctttggcaatgatgaagtttatgtagaaaaattaattgagaatccgaaacatattgaggttcaggtcattggagacaagcagggcaatgtcgtccatctttttgagagggattgctccgttcaaagacgccatcaaaaagtcattgaagtggcgccgagtgtctcgctgtcacctgaattaagggaccaaatttgtgaggctgcagttgcgcttgccaaaaatgtaaactatataaatgcggggacggtcgaattccttgttgcaaacaacgagttctactttattgaagtaaatcctcgcgtacaagttgaacacacgataacagaaatgattactggtgtcgatattgttcaaactcagatccttgttgcccaagggcacagccttcacagcaaaaaagtaaatattcctgagcaaaaggacatttttacaatcggctatgccattcagtcacgggttacgactgaggatccgcaaaatgatttcatgcctgatacaggaaaaatcatggcttaccgctcaggcggcggttttggtgtccgtcttgataccggaaacagcttccagggcgccgtgatcacaccatactatgattcacttctcgttaagctttcaacttgggctttaacgtttgaacaggcagctgccaaaatggtgcgaaaccttcaggagtttagaatcagaggcataaaaacgaacattccgttccttgagaacgttgcaaagcatgagaagttcctgacagggcaatatgatacatctttcattgatacaacgcctgaattatttaatttccctaaacaaaaagaccgcggaacgaaaatgctcacttacatcggcaatgtgacagtgaacggcttccctggaatcgggaaaaaagaaaaaccggcgtttgacaaaccgttaggcgtaaaggtagacgttgatcagcagcctgccagaggaacaaagcaaattctcgatgaaaaaggtgcagaagggcttgcaaattgggttaaggagcagaaatctgtccttttaactgatacgacattcagggatgcccaccaatcgttattggcaactagaatcagatcgcatgatttgaaaaaaatcgcaaatccgacggctgcgttatggcctgaactattcagtatggaaatgtggggaggcgcgaccttcgatgtagcctaccgattcctgaaagaagatccgtggaaacgtttggaagatcttcgcaaagaagtgccgaataccttattccagatgttgcttcgctcatcaaatgcggtcggctatacgaattatccggacaatgtgattaaagaatttgtgaagcaatcagctcaatccggtattgatgtgtttcgtattttcgacagcttaaactgggtaaaagggatgacgttagccattgatgctgttagggataccggcaaagtggcagaagctgcgatttgttatacgggagatatccttgacaagaaccggacgaagtacgaccttgcatattatacatcgatggcgaaggagcttgaggcggccggagcccatattctcgggattaaagatatggcagggctgttaaaaccgcaggctgcatatgagctcgtttctgcgttgaaagaaacgatcgacattccggttcaccttcatacgcatgatacgagcggaaacggtatttatatgtatgcgaaagctgttgaagccggcgttgatatcatagacgtggcggtcagctcaatggcgggattaacgtcacagcctagcgcgagcggattttatcatgcgatggaaggcaacgaccgccgtccggaaatgaatgtccaaggcgttgaattgctgtcccaatattgggagtcggtgcgtaaatattatagtgaatttgaaagcggaatgaagtctccgcatactgaaatttatgaacacgaaatgccagggggccaatacagcaacctgcagcagcaagccaagggagtaggccttggcgaccgctggaacgaagtcaaggaaatgtacagacgcgtgaacgatatgttcggtgacatcgtcaaggtaacgccttcctcaaaagtagtcggagatatggcactctacatggtgcaaaacaatctgactgaaaaagacgtttacgaaaaaggtgaatctttagatttccctgattctgtcgtggagctttttaaaggaaatatcggccagcctcatggcggattcccagaaaaactgcaaaagctgatcttaaaagggcaggagccgattacagtcagaccgggcgaactgcttgagccggtgtcatttgaagcgatcaaacaggaatttaaagagcagcataacttggaaatttcagatcaggatgctgtggcatatgccctttatcctaaagtcttcactgattatgtgaaaacgacagaaagctatggagacatctcggtattagatacaccgacattcttctacggtatgacattaggtgaagagatagaagttgaaattgagcgcggcaaaacgctgatcgttaagctgatttcaatcggtgagcctcagcctgatgccacccgcgtcgtttatttcgaactcaacgggcagccgcgtgaagtagtcattaaagatgaaagcattaagtcttccgttcaggaaaggctgaaagcagaccggacaaatccaagccacatcgcagcttccatgcctggaacagttattaaggtattggctgaagcaggcacaaaagtcaataaaggtgatcatttgatgattaatgaagcgatgaaaatggaaacaacggttcaggcgcctttctcaggaacaatcaagcaggttcatgtgaaaaatggtgagccgatccaaacgggagatctgctccttgaaattgaaaaagcataaaaaacaaagagtgtatatcaatgatatacactcttgttttttatatagaaaatgtggagtgaaacagatggttagaagagatataaggggacttcagagattatagagtactgtcacaagcccaaaataaaaagaggcttatacagccaatattttagatgctttgtagtatgccgtgcatatttctttaagcactatctgatttaaaaggctttaatacttatgttcgcgagctatagatccatatgaaatttctataatcacgatgagaaaggggacagaccgaagtgagccgctcactgatcatcaagttcggcgaaggctggcgattgaaacgcataaagcgccaaaaaacaagacataaaaaagaccaaagccgcctaaggctttggtcttgagtccttatgattgcctggattcataacggaaacgagcaatcaataataagaagtagcatagaacgccaaacagacaggcaataaagaacgagtgggcaagtgcaaagcccagagccagttcagagtatacgatcataataccggacagtgcctgtaatgtaatgaaaataagacatgagatccatccccaaaagatctgtttttgatctttataggaagtaatagcatgaacagcggcaacaataatccatacaaataaaagtaaggctgctgctctgtggcccatttgcacccattcatggaattgggtcggaagtccattgttcagcgggctgcacagcggcacattaggacatgccagacttgattcagtgtgtcttacatatgcgcctgtatacacaacgatataggaatatattaaaattcctatcatgtgaaattgcatctttttgccgatttgaagcggcttaaccagtgttctgactgatttatcagcttcaaatatgagcaatgttaaaataagcactgaagcaaaagaaattaatgagatgccgaagtgaagcgccataatcagcgcgttcgaaccgaatacgacagccaatgcgccaagcaatgcctgaagaaataaaaagataattgacatgatcgcgagaaacgttgtttcacgaaaaatcggcgtgatttttctccatgaccaaaacgcaaggcttagcacaaggataatagagattccgcttgcgaatcggtggctccattcaataattgaagccggattcagttcagggaaaaaacggccgtgacacagcggccactgtctgccgcatccttggccggaacctgtttttgtaacgagggcacccccgattaaaacaattagcatgacaaatgtcgtcagaacaccgagagcttttaatgctttattcatacaatattcaccttcttaacatactgctgcaattttatatacgttccaagtgtaagcgaatatgtgttttgtggcaattcccagagccttttgttcacaaaaatataatagaatgacggcttctggaaaatgtacacttgattattcatgccgggtctgatagaaataaggtaaacgcaatgccgatttggagattgccttcatctttggtaaaattcataaaaagttcacaaataaattcctgtttgtcgtttaatatttaataggatgtttttttacaagatgttatcttgtatgatagagttgcaggttattttattctcctgcgttaggtttgtaagggaggtttacgttatggctaactccagaatcttaaatgatacagctatagacggacaaattgaagaaacaacggcatggaaagattttctgtcccttattaaaatagggatcgtcaattctaacctcatcacgactttcactggaatgtggcttgcactgcatatatccggtttaagttttttaggcaatataaacaccgttcttcttacgttaatcgggtcttcactgattattgcgggctcctgcgcgatcaataactggtatgaccgggacattgaccatcttatggagcgtacgaaagtaagaccgacggttacgggtaaaattcagccgagtcaggcgttatggtctggaattttgctggttgctttaggattgatcatgctgctgatgacaactgtcatggctgctgttatcggttttatcggagtctttacgtatgttgtattgtacacaatgtggacgaaacgccgctatacgattaacacagtagtaggaagcgtttccggtgcagtgccgccgcttattggatggacggcagtggaagggaatatcggtgtcgtagcatgggtgttattcatgattttatttatttggcagattcctcacttcttagcattggctattaagaaaactgaggattacagagctgcaaatattccgatgcttcctgtcgtatacggatttgaagtgacaaaaagacaaattattgtgtgggttgcgtgcctgatgccgcttccgtttttccttggtagcctgggtcttccgattgtcattctcggcttgctgttaaatatcggctggctgattcttggcttaatgggattccgctccaagaatatcatgaagtgggcaacgcagatgttcgtttactcgcttaactacatgacaatctatttcgttgccatggttgtcttgacgcttttctaaaaaatagatatgatgcttgttttatcgcttcaaaataaacgatgacaactagtaaatgccgccttgacctcttgtttaatcaggcggctttacttttatacatagatggcattttgagtaaaaaaactcataatttaagagaagaggaaatgtaagtgctttattggtgataggttggatggcgatagatttcgatccgctttccgcctttgtattgaccagaaaaggggttgggtgaaatggtaaagcattggcgtcttattttattattagccttagtgccgcttctattaagcggatgtggaaaaccttttttatccacgctcaagcctgctggcgaggtggctgataaacagtatgacctgacagtgctcagcacattgattatggtggttgttgttgcagtagtatctgttatcttcttttatgtgattgtgagattcagaagatcacgggtcggtgagaacacgataccgaaacaggtagaggggaataaatttttagaaatcacatggaccgtgatcccgattttgctgctcattattcttgtgattcctgttgtattatatacgctggagctagcggacacatcaccaatggataaaaaaggccgcaaagctgaggatgctcttgtagtcaatgttagggcaaatttatactggtgggagtttgagtaccctgattacggcattatcacaagccaggagctgattgtaccgacagatcagcgtgtatattttaatttaaaagcctctgatgtaaaacattccttctggattccttcagttggaggaaaacttgatacgaatacggataatgaaaataagttcttcctgacatttgattcaaaacgaagcaaagaggcaggagatatgttttttgggaagtgtgcagagctttgcggcccttcacatgcgctgatggattttaaggtgaagacgatgtctgcaaaagaatttcagggctggacaaaagaaatgaagaactataagtctacagcagagagcgatttggctaagcagggtgaagaactgtttaaagagaaaaactgcctgagctgccatgcggtagagccgaatgataagcgtgcagaagccgctagaacggcacctaacttggcgaccttcggtgaaaggacaaaagtggcaggggtgaaagaggccaacaaagaaaatgtgaaggcttggctgaaggaccctgacagcataaagccggggaacaaaatgacaggcacatatccaaagctctcagacagcgaaacaaatgcgctttatgaatacttaaaaggcttaaaagcggaaagcaagtagggaagaaagggagatattgggggaggtcacatatgttgaatgcgcttacagaaaagcggacgcgcggatctatgctttgggattatttgacgacggtggaccataaaaaaatcgcaattctttatttagtggcagggggattcttctttcttgtcgggggaattgaagcgatgtttatcagaattcagcttgcaaagccggaaaatgcgtttctcagtgctcaagcgtacaatgaagtaatgactatgcacggaacgacgatgatctttctggctgcgatgccgctcttatttgccttgatgaatgcggttgtgcctttgcagatcggggctcgggacgtttcgtttccatttttaaacgcgcttggtttttggctcttctttttcgggggcattttcttaaatctaagctggtttttgggcggagcgccagatgcgggctggacatcatatgcctcactttcgcttcattctaaagggcacggcatagactttttcgtcctcggactccaaatatcggggctcgggacgctgatagccgggattaactttttggccacgattatcaacatgagggctccgggcatgacgtatatgaggctgcctttgtttacatggacgacatttgtggcctcggcattgattttgttcgcgtttccgccgcttacggttggattggctctcatgatgctggatcggctgttcggaaccaatttctttaatccggagcttggcggaaatacggtcatttgggaacatttattttggatcttcggccacccggaggtttatatcctaattttgcctgcattcggtattttttctgaggtcatccctgtgttcgccagaaagcgtttgtttggctattcttcaatggtttttgcaatcgtgctcattggctttctgggctttatggtttgggtgcaccacatgttcacgactggtctcggcccgattgcaaatgcgatttttgcggttgcaacaatggctatcgcgattccgaccgggattaagatttttaactggctgttgacgatttggggaggaaatgtgaagtatacaaccgctatgctgtatgctgtctcatttattccatcctttgtgctcggcggtgtgacgggagtcatgctggcagctgctgcggctgattatcagtttcatgatacgtattttgtggttgcgcacttccactacgtcattattggcggcgttgtattcggccttttagccggtgttcatttctggtggccgaaaatgttcggtaaaattctgcatgaaacgatggggaaaatttcatttgtattgttttttatcggctttcacctcacgtttttcattcagcattttgtcggcttaatggggatgccgcgccgggtttatacgtttttgccaggacagggtctggaaaccggcaacttgatcagtacaatcggggcgttttttatggcggcagctgttattcttctgctggtcaatgtcatatggacatcggtaaaaggtgaatatgtaggtgctgatccatggcatgacggacgtacgctggaatggaccgtttcttcaccgccgccggagtataactttaaacagcttccttttgtcagaggacttgatccgctttggatcgagaagcaggcagggcacaaatcaatgacgccggcggaaccggttgatgatattcatatgccaaacggctcaatcctgccgctcatcatttccttcggcctttttgtcgcagcgttcgggctgctgtacagaagtgattacgcttggggcctgccggtgatctttatcgggctcggcatcacatttattacgatgctgcttcgttcagtaattgatgatcacggctatcatattcataaagaggaactgccgaacgatgataaaggggtgaaggcataatgcaagttcaagaaaaattcaccgcagaaacctttccagcttctcctgaaaaagtaaccctggaagggaaaaataaatttttaggcttttggctttttcttggcggagagactgttctgtttgcgtctctcttcgccacgtttcttgcgcttcggaattcaaatgccggtgatccgcctacgacggaaatgttcgatgtgacacttgtattcattgccacaatgcttctattaacgagcagtttaacgagtgtgtacgcgatgtaccacatgaagaacttttccttcggcaagatgcagctttggctgggaattacgattttattgggggcgggctttttaggactggaaatctatgagttcaagcattacacccatgaatttggctttaccatcacaagctctgcccttggttctgcgttttacacgcttgtcggtacacacggcgcccacgtggcatttgggcttatgtggatcagcacgcttatgatccgcaatgccaagagagggctgaatctgtatacggcgcctaagttttacgttgccagcctttattggcactttattgatgtcgtgtgggtcttcatctttaccgttgtatatttaatggggatggtgggataaacatggtcgataaaaaaagcagagggcatatcaatagcgaccttgaatttaagaaaaaaaagcatgcccgggagatgaaatatcaagtcctgtcttttggtttaatgatcggtcttacgattgttgcatttctgactgtggccacggacggtgtcggcagctggtttacgattcctttcattattttgctagctgcaattcaagtcatttttcagctgtattatttcatgcatatgaatcagaaagggcatgaggcgccggcactgtttttgtattcaggggtgtttgtcgcgtttatcactgtgcttgcgtttgtgacaattatatggtggtaatttgaacagccgccggaggtgaagaaatgaatcagttggagatatttgggtttcgcgcgatgtggagcccttatcttttttgtatcctgttaggcattacggcgctttatctctatttttacaggcgaatgtcttcaaagccgaatcgaataactggtaaagagatggtgtgctttctgtcggcgatgctgtttttatatgcagccgagggaagcccggttgatctgctcggacatattatgttcagtgcgcatatggtgcagatggccgtcctgtatttggttgtcccgccgctgttaatcgcggggattcctgcatggctctgggaaaaaatcattttcaggccttcaatcaaaccggttttttccttttttacgacgcctttaattgctttgcttttgtttaacggcattttttctttatatcatgtaccgcttatatttgatactgtcaaaacagatccgttttaccatacattaatcacttggcttatctttgtgcttgcgttcttcatgtggtggccgcttgttcataaggttgagcgtctacggcagctcagcggcttgatgaagctgggttatattatggcggacggtatgctgctcacacctgcttgcgccttgatcatgttcagcggtgcaccgttatacgccacctatacagatccggctttatgggctgaggcaatgaggctttgcgtgccagcggatatgatggggcaggtcccattaacagggccagagatgttgaatacactgcctttgttagaggatcagcagctcggagcagtcatgatgaaaatcattcaggaaattgtgtacggtacttttttggccgttatttttttccaatgggtgaagaaagaaagggaaaaggacgggcaggaggagccgccgtatattcagcagacgatatcataaaaggtacagcgaaatatgctgtaccttttcgttacatttgaactgtttttaacatgttggctatgtcctgaatcagtgccttgctttttgtcacaacctgtacgggaaactcttccgtttctccatattctactccatgagggtagtaatgctttcctaggagaggggacattaattgaatcacggcgcgcccgcttccgacatcgccttctgccgcaataccttgtatccgcaggtaaaacgtaccctcaatcgtcgaaaacttcttgtcataggtgactctctcgtaatcccattgacccgctctgataagacctttgctttccattaagtcgtctagccagctgagctcagccttaaccccttcaagtccgctttcagtaaacttcaacactgacccctccttataaaaattacctttcctgacaatcatagtatgaaagcgttaaactttcaatgaatcttcttcttttgaaagtatgcaaaaattaaattttgacgacaatagcactagactaaaggaggttaaacggatgacaaaaataaaagatctgatgacagccgacttgcaatattgcacggtattagataatgtatatgaagctgcagtaaagatgaaggacgcaaatgtaggagcgataccggtagttgatgaggacggggaaacattggtcggcatcgtaaccgaccgcgatctcgtattaagaggaatcgccatcaaaaaaccgaactcgcaaaaaatcactgacgcgatgactgaaaaacctgtcagtgtggaggaagatgcttcagtcgatgaggttcttcatttgatggcatcgcatcagctcagaaggataccagttacaaaaaataaaaaactgactggaattgtcacgcttggtgatctttctttatctgagcaaacgaatgaacgtgccggcagcgccttatcggatatttccgaaggggataatagagaagaaggcttttttcattaacacataaatctttgacatgttaaataggctgtattgtaatgggatgtaaacaagagattgtgaatcgccacgggggtgatagattgaaaaatatattgagagcaatggttatccttttgattatctgcggaacctatgttctgtttattcaatatggatctgttcctgaaaagaaatcaaatgacagcgagcctcaggtgtcgaatgaggaagcgcaaagcggcaaacgaatacatatgccgacttcagggttattgtccttcatgggcaagcacgccgatgaagtaacgaaaaagcttggggaacctgaacgtattgacccttcggcttatgattacgattggtgggtatacaatcaaggtaaggatcaatatatccaaatcggggtattaaacaataaagtggtcacattattcgcgtcgggtaatgatattaacgccaagcctttcaaaattggagaatcaactggcgaagtattcaagaccacccaggtggcaccatttgtgaatgtagagtataaaggaaattcctatcggtttgaattttctgaagaagatatcaatacaagaccgactgtaaaggtaggaaagatgtatgtccagctgtatatggacaaatttgaggggaagctatccagcatcagggcgtttgatgcgcagacctttgtaaagcaaagaccttatgaggtagtgtaccgcggggaattaattaaaccgaaagccgtttcagatgagaaatggaaaaagatccaaacaacgagcgaaaagcaaatccttgatttgacgaatgtcatacgcgttaaacatggacttgcgaagcttgagtgggatcagccaacggcggaagtggcatttgggcatagtgaggatatgaaggaaaataattatttctcccatgtctctaaaaaatacggctcgctgaaagaccgcttagaagaagggcatgttgattttcagcaagcgggagaaaatatcgcatacaattatgtggacggtccggctgctgtagaaggctggctgaatagcgaaggccatcgaaaagcgcttctgaattcagattatacgcatcttggtgtcggagtagaccggaaatattacacccaaaactttattaagcgatggtaatgaaagccgcggacgaatggttcccggctttttctatttccatacaagctggtctgaatgaatgtgctgatagcttacagataaggccgtttcccatcccttcagtcaggctttttcaccagtgtatagggatatcgctaaaaattcatttgggaatgaatataggcgaacacaatgcccgacaaaacgatacattgtagtaggtaacgattttcggagggggtgaggattgtggcgaatcaacatgccaatcattcaatcaatgactttaaacaattcgtcaaaaagcatcccaagctgataaaagaagtgcgcaaagaacaaagaagctggcaggacgtatatgaaaattgggtcctcttcggggagagcgacccgatttgggatccatatcgggaaccggaagaagcttctgaagctgtgcctgaaacaccgcaaaaaaatgattttgtctcgaaaatggtgacagcggtgaaaaagatggatgtcaatcaaatgaacgaacaaatcaataaaatgagccagtcgatctcatcgttgcaaagccttcttaatacattttccggaagcggacagaagcattctcagccaggctctggacagcatcctttttcttttcgaaaggattaaaaaaggggagctcatatgcgcaaagaggttcaggaatatattttagcaaacgaagaacggaaacgattcatcagagaacagccgatatggtaccgcaggctttcaagaaaaccggatgatctgtcctcctttcagcttgaaatgatgaatttttatgaaaaaaccattccgcatcgggtgaatcagtttacgaacgggattcaaatggcgcaaatgatgatgcaaatgtttcaagcgatgcggacaaaagattaaaaggccccgaagaagggtcttttttcatgcggtcataaggttttgttggcggctgcggttaagcattttccaattggctggtttcatggtaaactaacaactggaggtgcatgttatgtatgcgacgatggaatccgtgcggcttcaaagtgaagctcagcagcttgccgagatgattctgcagtcggagacggctgagaactaccgcaattgttacaagcgtctccaggaagatgaagaggcaggtcggattattcgttcttttatcaaaataaaagagcagtatgaggatgtacagcgttttggcaaatatcatcctgactatagagaaatatcccggaaaatgagggagatcaaacgtgagctggacctgaacgataaggtggctgacttcaagagagctgaaaatgagctccagtccattcttgatgaggtcagcgttgagattgggacagctgtttcggagcatgtgaaagttccgactgggaacccttattttgacggtttgtcttcatgcggaggcggctgcggttcaggcggaagctgcggatgtaaagtgtcctgacgagactggccgtctcgtcttttacatataagagaaaacaggcaggtgattgtattggagaataggcgccagggcatggttgtgtatctgcactccctaaagcagagcaaaatgctgaggaagttcgggaatgtgcactatgtatcaaaacgattaaaatatgtcgtactgtactgtgatatggaccaaattgaaaaaacaatggacaagattgcgtcttactcatttgtgaaaaaagtggagccttcttataaaccgtttttaaaattggaattcgagtcaaagcttgataaggcaaaagaatacgattataaaatcggcatatagctataaaaaaatccccgcaggcatctgcggggtccttctattccttaatatgttaaggagaaggcaaagggagaggagaaaccggaggaagaacttatggggaaacgtaagtcttctccgcggttggcaacaacatcctctagatgctgttgcttatagtatggacaaggatcatgctgcctatacacctgtttatcaagattagcgttcattgtttggaagaatgctttatgttaagataggattgatttttttctatgtacatagcggcgtccggccgaataaagaaacaaaatagcttttagaaaaagtggtgtggaacatgagagtaatttctggatcaaaaaaaggccgttcactaaaggctgtagccggaacatcaacaagaccgacaaccgacaaagtgaaggaatccattttcaatatgatcggcccttattttgacgggggcaggggacttgacttattcgcagggagcggaggtcttggaatcgaagcgctttcacgcgggtttgagcattgtatattcgttgaccgtgattttaaagcgattcaaacggtaaaatctaatttgaaaacgctggagcttacaaaacatgcacaggtataccgcaatgatgcggaacgtgctttgcacgctgctgctaaaagagaaaccggctttcgcggaatttttctcgatccgccgtataaggaacaaaagctgaaagcacttttaactttgattgacgaatatcaaatgctggaagaagacggctttatcgtcgctgagcatgacagagaggtcgagcttcccgaaaccgtaggagatcttgtgatgacaagaaaagaaacctatgggttaacaggtgtagcgatttataaaaagagggggtagtgaggtggcgagtatagctgtctgtcccggcagttttgatcctgtgacctacgggcatctggacatcatcaaacgcggggcgcatatttttgaacaagtgtatgtatgtgtgctgaataattcttcaaaaaagcctttgttcagtgtggaagaacggtgtgagcttctgagagaagtcacaaaagacattccgaacataacagttgaaacatcgcaaggcctgttaattgattatgcaaaaagaaaaaatgcgaaagcgattttaagaggcttgagagctgtatctgattttgaatacgagatgcaggggacatcagtaaaccgggtgcttgatgaatctattgagacgttttttatgatgacaaacaatcaatattcgtttctaagttcaagcatcgtaaaagaagtggcaagatacaacggctcggtatcagagtttgtaccgccggaagtagagttggcgcttcagcaaaaattcagacaaggatgagggttttgactcatcctttttttgttccgtttgtcagtctgtaagaaaaaatgataatgtacgtaaacagcgcgcatagtgtgacagcaggtccgatctgcacaagcagattccagccgtttataaaggcagttgacatgtcactgctgttaagagatttaaatacatactgatacggatcatgccatgctgtgtaaagaggtttccataaaagcatgacgaagacagcggcataaacgccctgcagcaaacgtgcgataaagaatggtttaaatctaatgtcggtttccgataaaatacctgccacctgagcttgtacggaaaagccgctaaacccaagaataaagctgacgataatggctttttgcagaagagaaacatctgtctcgctgacaagcttgctgcctaatgtaatttcaaacatccctgataaaagcggaatgtccaattgagtcggaagctgaaacaaagtcagtgctccttttgtgaaaacagacaaaacatcagtcagctggaccactgacaacagccgattgaagacagaaaataaaataataaagccgcctaccataagaagcgtttgaacagaagacgtcacggcgtcgcctaaaattttacctaagggccgtttttctgcaagtctggcggtatgaagagcgtgtaaagcatctttgactgaagggaaaggtatcgttttctttcttctgagatgctgctcttccttgcggccataggagcgcattgttaaaccgacggcaagattccccaaatagtgtgcagaagctaataaaatgcctagtgatgcgttttgaaagaaaccgacggcaacagcgccgaaaataaagagcgggtttgaagaattggtaaacgacgcgagccgttctgcctctactcttgaaatctgattttcctgccgcagacgggcagtgagttttgcgcccgctgggtttcctgatgccattcccatagcaagaacgaagccgccgacacccggcacgcgaaagatcggccgcataaaaggctcaagcaaaacaccgacaaaccgcacaatgccaaagccgattaagagttcggacagaataaaaaatggcagcaatgacggaaacacaacctcccaccacatagacagcccggttttagaggcttcgaatgaggcctgtggatgtgagatgacagtcgctgttaaaaaaagaaaaaacgaggcaatcaaaagtgtattaatcttcgacaagttcattcttacctccccgatgctaaaaatgcccaatgacatgtatatcatgataaaataatgtatgatgtaaaacggccaagcagtacctgtcctcttgattctttgtactaatatacgagcataggggttcagtttagaccatagaattcggtatacagggaattcaggcaggaggttaacgctttggccaaacctaaaatcgggttagcgttaggatcgggaggggccagagggcttgctcatctcggtgtgctttccagtttacataagcaccaaattgaagtggatatgattgcaggaagcagcatgggcgctttggtgggcagtttttacgccgccggacatgacgtggcaacgatgaaaaaagtagccaaagcctttaaacgaaggctttatgctgattatacggtgccgaaactcggttttttaaaaggtgaccgcgtcagacagcttgtgcatgcttatacattcggaaaaccgattgaagagctccaaatcccgctgggcattgttgcgtgtgatctacagacgggagaaaagattgtgttccgaaaaggatcagtgtcagatgcagtgagggccagcatcagcatcccgggtatctttattccgcagcggctggacggacgccttcttgtagacggcgcggtcgtcgatcgaattccggtttctgttgtgaaagacatgggagctgatattatcatcgcttcggatgtttccagggttcgaaaaactgaaacagcagtgcatatttttgatgtgattatgcaaagtatggatatactgcaaaatgaattagtgcggcatcaaacaattgccgcagatatcatgattcgcccttcccttgaaacatacagctcaagctcgtttgccaatattgaagaaatgatatcggcaggcgaagaggcgacaaaccgaatgatcagcaagataagaaaagaaatagagaattgggagggctcataatttgctacgtaaaaaacattttagctggatgctcgtcatcctcatactgatcgccgttttatcatttataaaacttccatactatattacaaaaccgggagaagcgacagagcttgcttcattgataaaagtggagggaggctacccggaaaaaggaagtctgtccttaatgactgttaaagtgggaccggctaatccatttacatatgtgtgggcaaagatgcacccttattatgaaattgttcctgatgagagcattaaggaggaaggcgaatcagataaggagtatatgaaaagacagctccaaatgatgaaaagctcgcaagaaaatgcggttatagccgcctatcaaaaggcaggaaaaaaagtcagctattcctttaacggcatatacgcaagctcagttgtagaaaacatgccggcaaaagggaaaatagaagtcggtgataaaatcatcagcgcagacggcaaaaactatcagtctgctgaaaagctgattgattatatcagcagcaaaaaagcgggagataaagtcacgttaaagatcgaaagagaagaaaaagaaaagcgtgtcacccttacgttaaaacaatttcctgatgagccggatcgggcaggaatcggagtttcgctttatacagacagaaacgtgaaggtagagcctgatattgattttgaaatcgaaaatattggcggcccgtcagcagggttaatgatgtcccttgaaatctataatcagctgacaaaaccagacgaaacaaaaggctacgatattgcgggaacaggtacgattgatgttgacggaaaagtaggcccgatcggcggcattgatcaaaaagtcgtcgccgcagacaaagccggaaaagacattttcttcgcgccaaatcaaaacggcgccagcaattccgattataagaacgcagtaaaaacagcaaaagatattgattcaaatatgaagattgtgcctgttgataccatgcaggatgcgattgattatttgaataagctgaaagcgaaaagcacctgattctcaggtgctttttctatacatttaaaaagtgttgttcatcttcgtcatatcgaatcggtgcatgtccgtattcctgtaggtcaaactcagttctcagcggctcttctatcggcaggctgtaaatcctgcttgcttttacgtccagatcgagagctggatgggagaaagaggacagtttgctgacaagcggaacagacagtgcttttttcttttcggataaataagcctgtccttttttcgtcatgccgagaagcctgatatacggcgccttatcgttgtcaagcagcttttgcatatcctgtttttttgttctggttaaaatgtgtgtattcatccgctggagccttgtccacgtatagcgttttgttttcagcagttccataaattcctgataggagctggattttctgatcgaacgaataattctgtgctctaaaccttcctccacctcgtatacttgctgtaattcccgtgccgttacagttgaaaggctgtattttaagtaagaaaagtagctttcaggtgtatgccacaatccgaaagatttgcggtaagctgctaattcacgtgcagatgcagcagggagaaaacgaaggcaggcttcgagattctggccaatcatcgcttttctaatgcttgtggcacttgctatatggttttcgccttcagggagatcggcatcatgatagtccgaagagattcgtgccgtagtataaggtttcataggatatcccccggttagaatcgaggtcacatactggtatcccaaaatgttatttggttttgacaagtcaagtgcactttcagtatgcaaaatggagctgaaggcgatagccgccgctgctgggtaactggccccctttttaagttcttctttaattcggtcattcaatatatgtttatgctcatcaataagctgtgctgtttctaaaaaaggcttgatatccccattttcactcccgaaaaacagcgcctcacattcaagttcgttcaggatggaaacactgccgcgtgcaaaaatgtctgctttttgcacggcataaagataaggcagctcaatgacaagatcaactccgctttgcagcgccatttttgttcgggcccattttgatacaacagcgggttccccgcgctgtaaaaaatgtccgctcatgaccgcgacagccgtgtcacatccggtttgcagctttgctgtttgggcatgataaaggtgaccgttatgaaagggattatattcaaccaccaatccgacagctttcatattttttccgcctttcttgctatgtttaaaaacgtatggtacatttgcaaatgaaaactcttacgccttatttttgttttaagtgtatgcatagcatattccgctgtcaacgatacttcaatggcagcattatgctgtaaagaaaaaatattgacaaaaacaatcttaaaagctataatcatgtttgttgctttcctgaggtgatacaaatgaaatggacgatttatcagctgcatcaaatgccaaaacaaagttttgagtttgatgaaacagttgagttaaatgagctgacaaagctgaattctgacattcgccgcatttctcccgttcgggtgaagggcagagcggatatcaaatccaaacaggtttcgtttgattttacaatttcaggcgaaatgcttttgccatgctcaagaacactcgttgatgttccgtatccatttgaaatttcaacaaaagaactgtttatatttcatcacacggatgatatagaagatgatgacgttcacattgttgaggacgatactatcgacataactccgatcgtgaaagaagaaattcttttagaaatccctatgcaaatcttttgtgaatctgaacaagaaaaaggagctgctcctcaagaaggaaaggattggcaagtcatttcggaagaagacaagaagaatcaagttgatccgagacttgcagcccttgaaaagctcttaaaacaagatgatgaatcttaactctttaaggaggtgggaataatggctgtaccttttagaagaacttctaaaatgaagaaaagattgcgccgtacacatttcaaacttaatgtacctggtatgacagaatgtccgtcatgcggagagatgaagttgtctcaccgtgtatgcaaagcatgcggatcatacaacggcaaagacataaatgtaaaaagtaactaatgagaaaagcgcagggtgaaagccctgcgctttttctttttctcttcctgtcagcttgcggaaaatttgtgagtgcaaatagtctatctaatctattaccggcatatgtatgagataaataagctgacatggagggagattgaatttgaccattacaagacaagatgcttggactcaggatgaggatttgctgctggcagaagtggtgcttcgtcatattcgagagggaggaacacagctttcagcctttgaggaggttggaagggcgctgaccagaaccgcggcagcctgtggtttcaggtggaactcgtatgtgagaaaacaataccagtcaggtatagagcttgcaaaaaagcaaaggaaagaactgagaaagcaaatcggcgttcattcggtcaatatgccgaattccatgaagcagactgcctcggcatcgtcagaaggaaaacgagatttgtccattcaggatgtcattcaatttctcgaacaattcaaagaaacaccgtctgcacaagaatttcagcttgaaagggaaaaattgaaggagcaaatccaatcgctgcaaaaagagcttgaggatttgcggagtgaaaatcagacattgcggaatcagctagagatgacagaagaggattacaaggcactgatcgatatcatggatcgggccagaaaaatggttgtttcgaaggaagacggaagaatgaaaaaagcggctcaagaaacgtaaagaaacgcctgaaatgaaccggccctatagtaagaataggccggttgttttgatttctatgcagactctcccggtgtcatttcgcgatccatatcaggatgccagatgagcgggttttcccctttgtcccgcgccatatcatacttaacagttttaaagttcattttgttccaaaattccgctgatttcattctcggatttgtccggatcggcattttgaatgattttgcaaattcaaccaaggctctcccgtatcccctgttctggtagcccggaagaacctcaagcttccacagctccaaataatcctggcggttgtcaaaatagggattcgatttgccgttaacttgatacagactcattcgtgctacaagtttatcgccaaaataaatcccgtaaaaaggcgaggtgctgtcattttcaataatattatcctgaagttcttcaagcattgaaagctcctgaatgccgtattctttgaatttcttgaattcttccagcgttttatagttgataagcagacgttctacctttgtcaaacaaatctccccctttgttgtttctacatatattgtaaacgctttatttaaaaaatccaaatatttaaactttaattttaagcacatgggatctttgagaagtaatttcttcttacttctgctatgataatacgtaaatgctaaattgggtgtgacatcatgaaaattggaattatcggcggaggctccgttggtcttttatgcgcctattatttgtcactttatcacgacgtgactgttgtgacgaggcggcaagaacaggctgcggccattcagtctgaaggaatccggctttataaaggcggggaggaattcagggctgattgcagtgcggacacgagtatcaattcggactttgacctgcttgtcgtgacagtgaagcagcatcagcttcaatctgttttttcgtcgcttgaacgaatcgggaagacgaatatattatttttgcaaaacggcatggggcatatccacgacctaaaagactggcacgttggccattccatttatgttggaatcgttgagcacggagctgtaagaaaatcggatacagctgttgatcatacaggcctaggtgcgataaaatggagcgcgttcgacgatgctgaaccagaccggctgaacatcttgtttcagcataaccattcggattttccgatttattatgagacggattggtaccgtctgctgacgggcaagctgattgtaaatgcgtgtattaatcctttaactgcgttattgcaagtgaaaaatggagaactgctgacaacgccagcttatctggcttttatgaagctggtatttcaggaggcatgccgcattttaaaacttgaaaatgaagaaaaggcttgggagcgggttcaggccgtttgtgggcaaacgaaagagaatcgttcatcaatgctggttgacgtcattggaggccggcagacggaagctgacgccattatcggatacttattgaaggaagcaagtcttcaaggtcttgatgccgtccacctagagtttttatatggcagcatcaaagcattggagcgaaatacaaacaaagtcttttgagctttttcggtaacatgctatactcatttcggatcactaactatttattggagaaaggaagttctagaagatgcagctaactgaactttccatcaaaaatcagaatgtgtttgtacagcactatatagatggcaaagaagaaatgtcttctttttttgattacagtattcatcataaggacatgtggcgcgaaagactggaagacttatcttcccggtttttcgcaagagaggaattggcggcgtacttaacctcttaccataataaattcggttcaagtgcgatgcagtctgctattgagaagctgaaggacccgtcaagtgccgctgtagtcggcggacagcaggcaggacttttaacaggaccgctttacaccatacataaaatcatttcaatcattgttttagcaaagcaacaagaaaaggaactgcaagtgcctgtcataccaatcttctgggtggctggagaagaccacgatttggatgagattaattttgttcacacatctgaagagaatgggcctgtgaaaaaaaagctgcctcagtcttattggaagaaatcatcagcagcgagtacatcgcttgatcaggaaaagtgtgccgcgtggatagatgatgtttttgccgcttttgaagaaacagaccatacgaatacacttctcgacaatgtgaaacgatgtttaagggaatctgttacgtttactgacttctttgaactgctgatcgcggatttgttccaagaagagggcttagttttattaaattctggggatccggggattaaaaagctggaaacggccatgttccaaaagattcttcgagaaaatgatgaactcgcccgggctgtatcagatcagcaggccttcatgcgtcaagcaggctacaaaccgattatcgagtccggaaaagagcaggcgaatctgttttatgaatacgaagatgagcgttttttaattgaaaaagataacggccgatttgtcatcaaagagcttgatctaggatggacgagggatgaacttcatacacatatggaagaacatccagagcgtttcagcaacaatgttgtaacgagaccgttaatgcaggaatttctcattccgactttagcatttattgcagggcctggggaaatcaattattggggcgagctcaaacaggcatttgcggtgatgggcttcaaaatgcctcctgtcatgccaaggctgaacattacgatacttgagcggcatattgagaaaaaactggctgaacggaatatctcattacaagacgcgattgagcgcggaacggagaatcaaagagagacatacttcgagcgccagattccggaagagtttacggcggtgatggatcaggcgaaaagccaaattgaagcgattcacaaaacggtccggcaggaggcgttaaaggttgatcaaagcttggaacctttacttctgaaaaatgccgcttttattcaggatcagcttcaattcttagagcgcacggtgatgaagcgaattgaagaaaaagaaggctacgtcttgaaggattatgaaagaattcaaaatagcattaagccgcttcttgcgccgcaagaacggatttggaatatcatgtattatttgaacaggtacggtccaaaattcttcacgacattcaagaatctgccattttcttttcaaaatcaacatcaagttgtcaaactttgaaataaagttttaaagaaccctgactagttcagggtttttttttatgggtaaacagtgtaaaatgaagttgtggagcgaagtggtgaatagtggtgagttaaggagagaaagtggggcaagagatcatgtttatgggtgaatatcagcataccatcgatgcgaaaggccgcatgatcgtacccgctaaattcagagaaggcctaggtgagcaatttgtgctgactagaggacttgaccaatgtctcttcggctaccctatgcacgaatggaaacaaattgaagaaaaactaaaagctcttcctctcacaaagaaagatgcccgcgcgtttacccgtttcttcttttcaggggcgactgaatgcgaactggataagcaaggcagggtaaatatcgcatcatctctattgaattacgccaaactggaaaaagaatgtgttgttatcggggtttctaatcgaattgaattgtggagtaaagtaatttgggaacaatacacagaagagcaagaagattcatttgctgaaattgctgaaaacatgattgggtttgatatataatgattcttcgtgtataacactctaaaaacaatttcaattcatcctgataaaaggtgggaccaacacaatatgtttcaacacaagacagtacttcttcgtgaaaccgtagacggacttaatattaaaccagacggtacatatgtagactgcacactcggcggagctgggcatagtacatacttattgcagcagttatccgagaaggggcgtttaatcgcttttgaccaagatgatacggcattacagcatgctaaagaagtgttgtccgattataaaggacagctcattctgattaaaagcaatttcaggtatttaaaagaatatttgaatgaacaaggcgttacagaagtagacggcattttatttgatttaggggtgtcctctccgcagctggatacaccggagcgcggattcagttaccatcatgacgcaccgttggacatgaggatggaccagtcggctacgctttcggcgaaagaagtcgttaatgagtggcgctatgaggatctcgtccgtattttctttaaatacggagaagagaagttcagtaaacagatcgccagaaaaattgaggaggcaagaatgaagtctcctattcaaactacgggccaactggtcgatctaataaaagacgcgattcccgctccagcgagaaggagcgggggacatcccgctaaacgcgtgtttcaggcaatcagaattgccgtaaacgatgaacttagggtgtttgaagaagctttggagcaggcaattgaggttctgaagccagggggcagggtatcggtcattaccttccactcgctagaagacagaatttgcaaaaccacttttaaagaaaagtcgtcgcttccggaacttcctccgggacttcctgttataccggaagagtttgaaccggagctgaagctcatcacacgaaaaccgattacggcatctcaagaagagcttgaagagaacaaccgggctcgttctgccaagcttcggattgctgaaaaaagaaaataacgaaacgcgaacgcaaaattaaaaggaggtcatcagcctatgagcaatttagcttaccaaccagagaaacagcagcggcatgcgatcagtcctgagaaaaaagtgattgtcaagaaaagggcttccattactctcggagaaaaagtgcttcttgtcctctttgctgcggcggtgctcagcgtatcgcttttgatcgtatcgaaggcgtatgcggcatatcaaaccaatattgaggtgcaaaagcttgaggagcaaatttcatccgaaaataagcaaattggtgacctcgaaaaaagcgttgctgatttaagcaaaccgcagcgcattatggacattgcgaaaaagaacggcttgaatttaaaagataaaaaagtgaaaaacatacaggaatgattcaaatgccaaaaaagaataaatttatgaatagaggagcagcgattctaagtatttgtttcgctctctttttctttgtcatcctggggagaatggcatatattcaaataaccggaaaagcgaacggcgaagtgcttgcgacaaaagcgacagagcagcatgaaaagaaacggaccatcgaagcgagccgcggctcgattttagaccgaaaaggaaaagtcattgcagaggacacagcgacgtataaactgattgcgattctcgataaaaaaatgaccactgatgtcaagcatcctcagcatgttgtaaacaaagaaaaaacggcggaagcattgtctaaagtgataaacttggacaaggccgacatccttgatatcttaaataaagatgcaaaacaagtcgagtttggctcagctggccgggatattacgtattcacaaaagcaaaaaatcgaaaaaatgaaactcccgggcatttcatttttacgggatacaaaacgctactatccaaacggagtatttgcatctaatctaatcggctatgccgaggttgatgaagaaacaaatgaaatttccggcgcgatgggattagaaaaagtgctggataagtatttgaaggagcgggacggatatgtgacatatgaaagcgacaaatccggctgggagctcccgaacagcaaaaataaaattacagcgccaaaaaatggtgacaatgtatatttaaccattgaccagaaaattcaaacctttttggaagacagcatgacaaaagtggcgcaaaagtataatccgaaaaaaatcatggccgcagtcgttgatccgaaaacgggcaaagtccttgccatgggacagcgcccaagctttgatccgaacaagcgcgatgtgacaaactactataatgatttgatttcatatgcgtatgaacccgggtccacgatgaagatctttacactcgctgctgcgatgcaggaaaacgtgtttaatgcgaacgaaaaatataaatcagggacatttgaagttggcggagcacctgttaaggatcacaataacggtgtaggctggggtccgacaacatatcatgacggcgtcctaaggtcgtcgaatgtcgcttttgcgaaactggcgaaagaaaagctgggatatgaccgcctcaatcaatatttgcacaaattcaatttttaccagaaaacaggtattgatttgccaggagaagtctccagcaaaatcaactttaaatatgaatttgataaggcgtcaactgcatatggccaagcgtctgcggtcacaccaattcagcagattcaggccgcaacggcaattgcaaatgacggtaaaatgatgaaaccttatgtcattgaccatatcgttgaccctgataaagataaaactatttatcaaaataagccggaatcagccggaactccaatttctgcaagtactgcgaaaaaggtgcgggatatattaggagaagtcgttacatcgaagatcggaacagggcaagcttataaaatcgaaggttttgatgttgccgggaaaacaggtactgcgcaaatagccggtaaaggcggatatttagacggcacagataactatatcttttcgtttatgggtatggcgccaaaagatgatcctgagcttttaatttatgttgctgtacagcagccgcaactaaaagcaggacaaagcagttcagatccagtatcagaaatcttcaatccaacaatgaaaaatagcctgcactacctaaacatcgaaccaactgaaaaatctgactcagataaggaagaaacaaaagcgcagacaatgcctgatttaacagatcaaacggtagctgctgctcaaaagaaagcaaaagaggagaatctcacaccaattgtcatcggcagtgatgtcgctgtaaaagaacagtatccgaaagcggatgaggaagttctcaccaatcaaaaggtcttcctgaaaacgggcggcaaaatcaaaatgcctgatatgacaggctggtcgagaagagaggttctgcagtacggcgagctcgcgggaattcatattgaagtaagcggacaaggctacgctgtcagccaaagtgttaagaaagacaaagaaatcaaagacaaaaccgtaatcaaggttaagtttaaaaatcctgattaaaaagaaagccgtcgttatgcaggctttctttttttatgccttcagaggagcatcgttctacctgtccaaattcaggcataaaatgaaacaagcctaaataaggagtgaacggtctcttgcgcgtctcgaatgtaacggttagaaaacgtttattatttgttttgctttttggcgtgatcgtgtttctgatcattgatacaaggctggggtatgttcagtttgtgatgggcgaaaaactgacttcgctagcgaaagattcctggagccggaacttgccgtttgagccggagagaggcgagattctggatcggaatggtgtgaagctcgcaacaaataaaagtgcgccgaccgtattcgtcgtgccgcgccaagttcagaatccgatgaaaacgagcaagcagcttgcggcggtgctcaatatgtcagaagaaaaagtatataaacatgtgacaaaaaaagcgtcaatcgaaaagatcactcctgaagggagaaaaatttcaaatgagaaggcgaaagaaatcaaagcgcttgatttaaaaggtgtgtatgttgcggaggacagtatccgtcattacccgttcggcagctttttatctcatgtgcttggatttgcaggaattgacaaccaagggctccttggacttgaagcctattacgacgatgatttaaaaggggaaaaaggttctgttaagttttatacagatgccaaggggaagaagatgcctgatgaagcggatgactatacgccgcctaaggatgggcttgatatgaagctgacagttgattcaaaggttcagacgataatggaaagagagcttgataacgctgaggccaaatatcatccggacggcatgattgccgtagccatgaatccgaaaaacggagaaattttggggatgtctagcaggcctgacttcgaccctgctgattaccaatctgttgatccgtccgtctacaatcgaaatctgccagtatggagcacgtatgaaccgggatctacctttaaaattattacacttgcagcagcccttgaagagcaaaaagtaaatttgaaacgggatcaattttatgataaagggcatgctgaagtggacggagcgagactgcggtgctggaaaagaggcgggcacgggctgcagacgtatctggaagttgtgcagaactcctgcaacccggggtttgttgaattaggcgagcgcttaggaaaggaaaagcttttcaaatatatcaaagactttggttttggacaaaaaacggggattgatctccaaggcgagggaacaggcatcttattcccgcttgagagagtgggcccggtggagcaagcaactacggctttcggacagggagtatccgtcacgccgattcagcaggttgcagcagtatccgccgctgtaaacggaggaacgctctatacaccttatattgcaaaggaatggatcgatcctgttacgaagaaaacggtcaaaaaacaatcaccaatcgcaaagaaacaagtcatttctgaggaaacatccaaacaaatccgctatgctctagaaagcgtcgtcgcagaaggaaccggccgcaatgcatttgtagaaggatatcgtgtcggaggaaaaacgggaactgcacaaaaggttaaagatggaaaatatcttgaaaacaaccatattgtatcatttatcggtttcgcgccagcagatgatccgagtctagtcgtctacgttgcggtggataacccgaaaggcacgattcagtttggcggaacggtggcagcgcctattgtcggaaatattatgagagacagtctgccggaacttggtgtgaagccccggaaaaatcaaatcgagaaaaaataccaatggaacgacacaaaaacaatagaagttccgaatgttgtagggatgtctgtctcagatcttgagtcactattggtgaatctcaatgtggatgcttccgggaaagggagcaaaatcgttaaacaatcgccagctgccggaacgaaagtaaaagaaggctcaaagatacgcgtgtatttgactgaagaagatgaaaaggaggcagccgattgattcgggctgcctattcttttattgcagaaaaaatgctgatatctttcaagattagctggatgtatccttttatttacgctaaaatatgaactgtatgcttaaaatcattaccacatcatttgatgtgacttcaatgataaaaagaacgaattagaatgttgagaggtttgatacgatgaaacttacaaagctgcttacatacttaacaaccgaaccttctgtaaacgactcacaagaccctgaaataacttcaattgagatggactccagggaagtaaagaaagggagtctttttgtatgtgtaaaagggtatacggtggatggccacgattttgcgcaaaaagcagtagaaaacggtgcagcggctattgtggcagaaagagaggtcgatgtgaatgttcctgttattattgtccggcagtcacttcgcgcgctcagcgttttgtctgatgcgttttacggacagccgacgaagaagcttcagctgattgggataacagggacaaacggcaaaacatcaacgacccacatggtcgatgagattctgaaaaaagcgggaaaacgcacaggcttgatcggtacaatgtacatgaaaatcggagacgaaacacttcctgttaaaaacacgactccggaaagcgtcacgctgcagaaaacgtttaagaaaatgaatgacaagcacgttgacactgcaatcatggaggtttcttcccacgctttgtctttaggacgcgtccatggctgtgattatgatattgccgtgtttacgaatttaacacaggaccatctggactatcataaaacgatggatgagtaccggcatgcaaaaagcttgctcttttcccaacttggcggggctttcaaccatgaacatccaaagcgtgccgtcctgaatgctgacgatgaggcgagcgcttattttgaaaaggtaacagctgcgcatatctctacatacggaattaaaaacgatgctgatgtgatggcgaagaacatcagtatcactgcacagggcacaagctttgatctcgtgacaaacaaaggcacgaagcacatcacgatgtctctcgtcggacaatttaatgtgtataacgtgctggccgctgttgcgacatgtattgcagcaggcataccgtttgaaatcatcactgaggctgttgaagaattgcatggtgtaagaggccgttttgaattggtcaatcagcagcaggagtttcctgtcattgtagactacgcgcacacaccggacagccttgaaaatgtgctggagacatgcagagacatgacggaaggaaagctatttgtcgttgtcggctgcggaggagacagagataagacgaagcgcccgaaaatggctaaaattgctgtggagctggctgacgagccgattttcacgtcagataacccgagaagcgaagatcctcgcgcgattttaagagatatggaagccggagtagagaacgcatactatcacagtattgcaaaccgcgagcaggcgatctttttcgcaattgccaatgccaaaaaaggcgacgttgtcctcattgccggaaaaggacatgaaacctatcagcagatcggaaatgaaactttcgattttgatgatgctgaagtagcggcgagagccattgttgaactcaataagaataagacgaattcataggaaagagatgttactgaataatggagcttgaaaagatttttcatatggaaaaaaatcatgaatatgataactacgtatgtcgtttgaaagaaacaggaggagaaaaggacaatgcttgagcaagtcattctgtttacaattttaatggggtttttaattagtgttctgctctctccgattcttattccgtttttaagaagattaaaattcggccagagtattagagaagaaggaccgaaatcacatcagaaaaaatcagggacaccgacaatgggcggggtcatgatcatactttctatcatagtgacaacaattgttatgacacagaagttttcagaaataagccccgaaatggtgctgcttctgtttgttacgctaggctacggtttgcttggctttttagatgattacatcaaggttgtcatgaagcgcaatcttggattgacatcaaagcaaaagctgatcggacaaattattattgcggttgtattttacgccgtgtatcattactacaattttgcgacggatattcgcattcctggaactgacttatcatttgatcttggctgggcttactttatccttgtgctctttatgctagtcggcggatcaaacgcagttaacctgactgacggccttgacgggttattatccggtactgcggcgattgcctttggcgcctttgccattctggcatggaatcagtctcaatatgacgtagcgattttctcagttgccgttgtcggtgcagttctgggcttccttgtatttaatgctcatccggccaaagtttttatgggagatacgggatcgcttgcattgggaggagccatcgttaccattgccattttaacgaaattagagatcctgctggttatcatcggcggtgtattcgttatcgagacattatccgttattttgcaggtcatcagctttaaaacgacaggtaaacgaatctttaaaatgagtccgcttcatcaccattatgagcttgtcggctggtctgaatggagagtagtcgtgacgttttgggctgcgggacttttgcttgccgttttaggaatttacatcgaggtgtggttataagtggaaaatgatcaatttttacagaaacagcattttttaatccttgggcttgcgaaaagcggatatgcggcggcctccattcttcatgaaaaaggcatttatgttgcagtcaatgatcaaaagccttttgaagaaaatgaaccggcacaaaagctttctgaaaaaggaatcgaagttgtttgcggagagcatccagtttctctgttcgatcagcatcaaatcacgattctgatcaaaaacccgggaattccttatgaaaatatcatggttcaggaagcagagaaacgaggtattccggtttggacggaaattgagctcgcttactacctgaccagcgccaagtttatcgggattaccggatcgaacggtaaaacgaccacgacaacgctaatttacgaaatgctcaaggctgactcgcaaaaagcactgattgccggaaacatcggcacagtcgcaagtgaggttgcctatcatgctgatggagatgaatggatcgttaccgaactgtcttcgtttcagctgatgggaacacacgctttcagaccggaaatcagcctgattttaaatgtatttgacgcccatctggattatcaccatacgcgcgaaaactatgaaaaagcgaaacagaaagtgtaccttcatcagactgcttcagataaagctattgtcaaccaggatgatgaaaccgtcgtgcgtcttgctgaagccggaaaagccgaaatcgtcccattttcagtcagcaaaacgcttgaacagggcgcatatgtaaaagacagtatgattatgtttaacggcgaagccattcttcctctggaagaggttgtactgcccggtgctcataacctggagaacattttagcagctattgcagttgtgaaaacggcaggagcatccaatgaggcggttaaaaaggtgctgacaagctttactggtgtgaagcaccgcctccaatatgtcacaactgtgaatggccgcaaattttataacgacagtaaagcaacaaacattctggcgacaagcaaggcgctttcagcttttgataagccggtcattctgcttgcgggcggactggatcgcggaaatggttttgatgacttgaaaccttatatgaagcatgtcaaagcagtgcttacatttggccagacggcgccaaaactcgagaaactcggcaatgaactgggaatacaacatgtcaaacgtgtcgataatgttgaacaagcagtatctgcggcgtttgcgctctcaaatgaaggagatgtcatcctgctgtcacccgcgtgtgcgagctgggatcaattcaaaacatttgaagaacgcggtgacatgtttatagatgccgtgcatatgcttaagtaagggcttgtcttgaagtaaatcggcagccctaatgactttaagcttggggtgtcgattgctttgactactaaaaaaacatcgcctgatttgttattggtcatcattacgttattattattaacaatcggattaattatggtgtacagtgcgagtgcggtatgggcggattataaatttgacgactcattctttttcgcgaaacggcagcttttgtttgcgggaatcggcgtcattgctatgttttttatcatgaatgttgattattggacttggaggacatggtccaaattgctgatggttatctgctttttccttctggtgcttgttttgataccgggcgtcggaatggtgcggaacggttcaagaagctggatcggagtcggagcattcagcatacagccttcagagtttatgaagcttgcgatgattgcattccttgctaaatttctctctgaaaaacaaaaaaacatcacatcgttcagacgggggttcgtccctgcacttggcatcgtgttttcagcatttttgattatcatgtgccagcctgacctcggaacggggacagttatggtcggaacttgtattgtcatgatttttgtagccggcgcacggatcgcccatttcgtctttctcgggctgatcggcctcagcggatttgtcgggctcgtactatcggctccatatcggataaagcggattacctcatacttaaatccatgggaagacccgctcggaagcggatttcagatcattcaatcgctttatgcagtggggcccggcgggttgttcggaatggggctcggacaaagcagacagaagttcttttatctgcctgagccgcaaacagactttattttcgccatcttgtcagaggagctgggctttatcgggggaacacttattttgctcctcttcagcgtcctgctgtggagaggaatcagaattgcgcttggtgcgcctgatctgtacggaagctttgtcgcagtcggcattatttcaatgattgccattcaagtcatgataaatatcggcgtagtcacgggcctgattcctgtaacaggcatcacgctcccgtttctgagctacggaggctcttcattgactctaatgctgatggcagttggtgtgctgctgaatgtaagccgctactcgaggtattaacgaatgtatttccaagcctcctgtctaacatgaagcttggaaacaattgatgcgataaccctgtccaacaaaacagggttatcgttatgttatagagaaacttagactgggggaaaaaagaaatgcgaattgcaataagcggaggcggtacagggggacatatttatcctgctcttgcttttattaaagaagtgcaaagacgtcatcctaatgtggaatttttatatatcggaacagaaaacgggctggagaaaaaaattgttgagcgggagaatataccgtttcgttcaattgaaattacaggatttaaaagaaaattgtcatttgaaaatgtcaagactgtgatgcgttttctgaagggcgtcaaaaagagtaaatcgtatttagcggaatttaagcccgatgccgtaattggaacgggcggttatgtatgtgggccggttgtctatgccgctgcgaaaatgggaattccgactattgtccacgaacaaaacagcctgccgggcatcacgaataagtttctttcaaaatatgttaataaagtagcgatttgttttgaagaagcgaaatcacattttcctagcgagaaagttgtatttacgggaaacccgagagcctctgaagtcgtctcaataaagacgggacgatcattggctgaatttgggctttctgaagacaaaaaaacggtcttaattttcggcggaagccgaggcgctgcaccgattaaccgcgctgtcattgacatgcaggatgtgctgaaaacaagagactatcaagtgctgtatatcaccggtgaagttcactatgaaaaagtaatgaatgagctgaaaagcaagggtgccgctgataatatggtcacaaagccgtttcttcatcaaatgcctgagtatttaaaggccattgatgtcattgtggccagagccggtgcgacaacgattgccgaaattactgctctcggaatcccaagtgttctgatcccaagtccatatgtgacagcgaatcaccaggaggtcaatgcgaggtctcttggccagcatgatgcggcgattgtactgaaagaaacagagctcagcggggagaagctgattgaagcgctagaccggattgtactgaatgagcaaacgttaaaggaaatgagcgaacgaacaaagtcactcggtgttcctgacgcggctgcccgtttatacagcgtactcgaggaattaaaaaaatagtagaaaagcaaatggaatgcggaggtttacgatggagaaagtgatacaggaattaaaagaacgagaagtcggcaaggttcttgcaaatgaaccgctcgcgaatcatacaacgatgaaaatcggcggacctgcggatgtattggtcattccaagcagtgtggatgctgttaaagacatcatggacgtgattaaaaaatatgatgtgaagtggacagtcatcggccgcggatcaaatcttcttgttttagatgaaggaattagaggcgtagtgatcaagctgggggcgggtcttgaccatttggagcttgaaggggaacaagtaacagtcggaggcggttattcggtggtccgccttgctacatcattgagcaaaaaaggcctgtccggtttggaatttgctgccggcattccaggatcagtcggcggagcggtttatatgaatgccggcgctcacggttctgatatgagcgagatcctcgtcaaagcgcatattttatttgaagacggaacgattgagtggctgacaaatgagcagatggatttcagctacaggacatctgtactgcaaaagaaacgcccgggcgtttgccttgaagctgttttgcagcttgagcagaaggataaggaatcaatcgttcagcaaatgcaaagcaataaagactatagaaaaaatacacagccgtattcaagcccttgtgcgggaagcatattcagaaatccgcttccgaatcatgccgggaaccttgtagaaaaagcaggcttgaaaggatatcaaatcggcggtgcaaagatatcggagatgcacggaaacttcatcgtcaatgcggggggagcatcagcaaaagatgtgcttgatctcattgaccatgtgaaaaagacaatccgtgaaaaatacgagattgatatgcacacagaggttgaaatcatcggcggaaatcgctgattcaagttctgactgaagctgttcatatgatatactgtaagcaaacgacaaacggcatcatagtatgccgtttgttttggaatagacagacttttaacagctgtttcatttgaatgaggtgaacaggcaatgaacccgggtcaagaccgagaaaaaatcgttaacattgaagagcggatccctaaaattaaagagcagaggaaacaaaaggcaaaccgccgtctcatttcatttattatgctcttttttattatggtgctgatcattgtgtacctgcaaacaccaatcagtaaagtatcaacaatctctgttacagggaatgaaaatgtatcaaaaaaggaaattatcgacctttccgatattaacagcggagatactgagttttggagtttggacaagcaaaaaacagaaaagaagattcagcaaaataaattagtgaaaaaagcggagatcagcaaatcgcttcctaataaaatcaacattgcaatcgaagaatataaagcgattgcttatttagaaaaagacgatgtgtactatgaagtgcttgaaaacggctcagttctgccaaacgaagtaacgccggatgatgccggaccgattttagtgaattggacaaacgcgaagaagcggtctcaaatggccaagcagctcgatgcgttgtcaaattcgttaaaacagtcgatttcagaaatttattatacgcctgtaaaaatggatgaaaaccgtattaagttgtacatgaacgacggttatgttgttacggcatctattaaaacgtttgcagaccgaatgaagacgtatccttctatcatctcacagctaagcagcaataaaaaaggaatcattcatttagaagttgccacctattttgaagagtttgggaaaaacgataaagctgctaaaaaggaagatgaaaattgaggggcaaatcagcagtccttctttccttgattatgcttatcgcaggttttttgatttcattttcttttcaaatgacaaaagaaaacaacaaaagcgcggctgagacggaagagtggaaaaaagaatatgcgctgagagatgaactgctgaaacaagagaaagaaaataagaagtttgaaaaagaattatatcaaaagcaaaacaaagtccgccaggcggaaaataagctgaagaaagagaagtcggaatactataatgtcctcgaagatacagaaaaatacaggatgtatattggggaagtcggtgtgcagggagaaggcgttgaggtgacattggaagatgcgtcatacataccggaaggggagaatgtgaatagttacatcgttcacgaaagccatatcttccaagtagtaaacgaactgtatatctcaggagcggcagctgtcgccgttaatggacagcgtttgacgcatgattcgtatatcaaatgcaatggtcctgtggtaacggtagacggggtgcagcatcccgctccgtttacggtatccgctattggagatccagatgtcctgctgccctcgttaaatatcgctggaggcctaattgatcagctgtcaatggatcatatttctgtgtcggcagaaaaagagaaaaacgtacaaatgaaaccgattctgaaaacgaaggaatgactgaaaaagcgggtgaaatagattgaaaataaagcgttccttcataagcatcagtgttcttatggtcatcttcggcctgatgatatctgttcagtttaattcgttaaagcaccccaaagtccgggatacaagagatatgtgggatattagggaagagctgacatcagagcagaagaagcaggaaaagctgctggctgaaataaacaaatatgacaaattgctgaatagctattcgcaaacgaaagaaatgacaaaagaaaccgcgctaaataataccttgcaatccttaaaaaaaacagccggcatgaccgatataacaggtagcggaattgtcattacgatttccccgcttttttctgaaagcttaacaggagagccgatcgaaaatccgcctccggatttgctgaaaaagctgataaatgaactcaactcctacggtgcagagcatatctcgattaatgagcgaagagttgtgaatcatacagtcatcagagatataaacggcactacaaaaatagacggatacgcccttgacgattatcctttaacagtaaaagtgcttgccaaagatccggacatgttacacagcagagtgaaggggtcaggccttgaggatctttttgcatctgaaaatttagcattaaaagccggtaaatctgaaagcaaactaacattaaaagcatatgacagaccactggacgtacaacagctgaaactgcttaaagactgaaaaggaggagaattgtcatgtggctgcccgtgttgggactggtgctcggaatagcgattggactaatgacaaacttaacgataccgagtgaatactcaaactatttatcgcttgcggtgcttgccgcacttgatacattaatcggcggaatcagggcgcatttacaaggtacatatgatgaaatggtatttgtttccggtttcttttttaatattatattggcaataagtttagcttttctgggagtccatcttggtgtagacttgtatttagcaggtatattcgcatttggagtcagattatttcagaatatagccgttatcagaagaaatctactaacaaagtggactctttctaaaaaaaataaaaaaaatgtgatataaaagaggatatacataggatataacgaatattttcaataaacataaaatgtgaaaagcacataaaaatattctgttgttattttttgttacacacttgtaaagccacattcattgtattgttgttccgcaaataatagaatagaaatgatcgaaatgtgaggaggtgccatagaatgaacaacaatgaactttacgtcagtcttgacatcggtacgtccaatacaaaagtgatcgtcggagaaatgacagatgattcccttaatattatcggtgtgggaaatgtaccgtctgaagggttgaaaaaaggctcaatcgttgatatagatgagaccgttcattctataagaaaagcgtttgaccaagctgaaagaatggtaggttttccgcttagaaaagctattgtcggcgttaatggaaattatatcaatattcaagatacaaacggtgttgtagcagtttccagtgaaaataaagaaattcaggttgaagatgtacgccgtgtcatggaggcggcacaggttgtttccgtaccgcatgaacagctgattgttgacgtcattcctaaacagtttatcgtagatggaagagatgaaatcaccgacccgaaaaaaatgctgggtgtgcgtttagaagtagagggcaccttgatcaccggttcaaaaacaatcttacataacttactccgctgcgttgaaagagctggtattgaaataactgatatttgccttcagccgctggcagccggttctgctgcattatcaaaggacgagaaaaaccttggtgtggctctcattgatatagggggagggtcaacaaccattgccgtattccagaacggacatctcacttctacccgtgtcattcctctcggaggcgaaaatatcaccaaagatatctccatcggattgagaacgtcaacagaagaagcagaacgcgtgaaaaagcaacttggacatgcctactatgacgaagcctcggaagatgaaatatttgaggtaaccgttataggcaccaatcaaaaacaaacatttacacagcaagaagcagcgaatatcattgaagcgagagtagaggaaattcttgaaattgtttcagaagagcttcgcagtatgggaattaccgatctgccgggaggcttcgtgctgacaggaggacaagcagctatgccgggtgtcatgtctttggcacaggatgtgctgcaaaacaatgtcagagtggcaagcccgaattatatcggtgtaagagatcctcaatatatgacgggagtgggcctgatccaattcgcctgccggaatgcaagaatccaaggcagaaaaataggctttaagatgcctgaagaagcgatacaggaaatcgcagtctcatcatctgaggaacaagagcagcatcatcaccaaaatgaggtgcagcagcggccaaaaggaaaacaaaaaacacaagccgaacataataaacagagcaaaatgaaaaaactattaagcatgttttgggaatagatagatagtcattcggcagattaggaggatttagcatgttggagttcgaaacaaacatagacggcttagcatcaattaaagtaatcggagtaggaggcggcggtaacaacgccgttaaccgaatgattgaaaatgaagtgcaaggagtagagtatatcgcggtaaacacggacgctcaagctcttaacctgtcaaaagcagaagtgaaaatgcaaatcggcgcaaagctgactagaggattgggagcaggtgcgaatccggaagtcgggaaaaaagccgctgaagaaagcaaagagcagattgaagaagcacttaaaggtgctgacatggtattcgtgacagctggtatgggcggcggaacaggaacaggtgccgcaccggttatcgcacaaatcgcgaaagacttaggcgcattaacagtcggcgttgtgacaagaccgtttaccttcgaaggacgcaaaagacagcttcaggctgcaggcggaatctcggcaatgaaagaagcggtggatacactgatcgtgatcccgaacgaccgtatccttgaaattgttgataaaaacacaccgatgcttgaagcattccgcgaagcggataacgtacttcgccaaggggttcaaggtatttctgacttgattgctacacctggtcttatcaaccttgactttgctgatgtgaaaacaatcatgtcaaacaaaggatctgctttgatgggtatcggtattgctactggggaaaatcgcgcggcagaggcagcaaaaaaagcaatttccagcccgcttcttgaagcggccattgacggtgcgcaaggcgtcctcatgaacatcactggaggaacaaacctcagcctatatgaggttcaggaagcagcagacattgtcgcttcggcgtctgatcaagacgtaaacatgattttcggttctgttattaatgaaaatctaaaagatgagattgtggtgacagtgattgcaaccggctttatcgaacaagagaaggacgtgacgaagcctcagcgtccaagcttaaatcaaagcatcaaaacacacaatcaaagtgttccgaagcgtgagccaaaacgtgaggaacctcagcagcagaacacagtaagccgtcatacttcacagccggctgatgatacgcttgacatcccgacattcttaagaaaccgtaataaacgcggctaatgtaaaggacaaaatcgttttcgattttgtccttttttgtttttctcttcacactttccttcttataaagtctttttccctattgcttccttcgcttagtaacaaaacagataattagacccatttatttttgtgacatttttatcattttcatatatatggaaattgaatgacatgaaacgacaatatctgtaattcagattgtctacagttaatatacagcgatgttctgacaaaccattcattattaaaaggagggacgacactttttttaaaaagcatgttgaaaaagggggatgaaaatgaggaaaaaaacgaaaaacagactcatcagctctgttttaagtacagttgtcatcagttcactgctgtttccgggagcagccggggcaagcagtaaagtcacctcaccttctgttaaaaaggagcttcaatctgcggaatccattcaaaacaagatttcgagttcattaaagaaaagctttaaaaagaaagaaaaaacgacttttctgattaaatttaaagatctggctaacccagaaaaagcggcaaaagcggctgttaaaaaagcgaaatcgaagaagctgtctgccgctaagacggaatatcaaaagcgttctgctgttgtgtcatctttaaaagtcacagccgatgaatcccagcaagatgtcctaaaatacttgaacacccagaaagataaaggaaatgcagaccaaattcattcttattatgtggtgaacgggattgctgttcatgcctcaaaagaggttatggaaaaagtggtgcagtttcccgaagtggaaaaggtgcttcctaatgagaaacggcagctttttaagtcatcctccccatttaatatgaaaaaagcacagaaagctattaaagcaactgacggtgtggaatggaatgtagaccaaatcgatgccccaaaagcttgggcacttggatatgatggaactggcacggttgttgcgtccattgataccggggtggaatggaatcatccggcattaaaagagaaatatcgcggatataatccggaaaatcctaatgagcctgaaaatgaaatgaactggtatgatgccgtagcaggcgaggcaagcccttatgatgatttggctcatggaacccacgtgacaggcacgatggtgggctctgaacctgatggaacaaatcaaatcggtgtagcacctggcgcaaaatggattgctgttaaagcgttctctgaagatggcggcactgatgctgacattttggaagctggtgaatgggttttagcaccaaaggacgcggaaggaaatccccacccggaaatggctcctgatgttgtcaataactcatggggagggggctctggacttgatgaatggtacagagacatggtcaatgcctggcgtgcggccgatattttccctgagttttcagcggggaatacggatctctttattcccggcgggcctggttctatcgcaaatccggcaaactatccagaatcgtttgcaactggagcgactgatatcaataaaaagctcgctgacttttctcttcaagggccatctccatatgatgaaataaagccggaaatatctgcaccgggcgttaatattcgttcatccgttcccggtcagacatatgaggatggttgggacggcacatcaatggcagggccgcatgtatccgctgttgctgcactgctgaaacaggcgaatgcctcactttctgttgatgagatggaggatatattaaccagcacggctgaaccgctcacggattcaacatttcctgattcaccgaataacggatatggccatggtctggtgaatgcttttgatgctgtatccgctgttacagatggattagggaaagcggaaggacaagtttctgtagagggggatgaccaagagcctcctgtctatcagcatgagaaagtaactgaagcttatgaaggtggcagcctaccactgactttgacagctgaagacaatgtgagtgtgacatctgtaaagctgtcctacaagcttgatcaaggtgaatggacagaaataacggctaaacgaatcagcggtgatcatctaaaaggaacgtatcaggcagagatcccagatataaaaggaactaaactaagctataagtggatgattcacgattttggcggtcatgtcgtttcgtctgacgtatacgatgtaacagtgaaaccaagcatcacggcgggatataagcaggactttgaaactgcacccggcggctgggttgcgagcggaacaaataataactgggaatggggagttccgtcaactggcccaaatacagcagcatccggagaaaaagtatatggaacgaatttgacaggaaattatgccaactcagcaaacatgaaccttgttatgcctcctattaaagcacctgattcaggaagtctgttccttcaatttaaaagctggcacaatttagaggatgattttgattacggctacgtttttgttcttccggaaggtgaaaagaattgggagcaggctggtgtctataacggaaagacatcaagctggacggacgaagaaattgatttatcggcttataaaggccaaaacattcaagtgatgtttaaccttcaatctgatgaaagcattgcaaaagagggctggtatattgatgatgtagtgctttctgacaaatcagccggaaaaacagtcaaaaagaataagctgggcgtcgaaaagccgtctggaaagcaaaagaaaaagccagtaaatccgaaaaaggctaagccatctgcaaacacagcggtaaaacatcagaacaaggctatacagcctcaagttttgccgctcaaggcacaagtcagtgtagtggaaacaggaaaatcaacatattcagatcaatccacagggcagtacacgctgaagcacaaagcgggagactatacgcttatggcagaagcatatggttatcagtcgaaaacacaaaaagtatctttaaagacggatcagacgacacaagctaattttacgttagaagagatgaagaagggcacattaaaaggcacggtcatcaataaaacgacaggagagccggtaacaggcgcttccgtttatgttgtagaggatgctgcggtggaaccggctatgacaaacgacaaaggtgaatatatgctggaggcctatgaaggcgcttatacgattaaagtcgctgcaccgggttattacagtgatgaattttccgttgagttaaaaggtgatgttacaaaagaaactgcattgaagcctttcgtcggttatccgggtgaaattgcatatgatgacggaacagcggagaatgccaattcctattttgctgccggtaacggatgggcggtaaaaatgacgctcgctgacggcaaggacaaaggcatgcttacaggagggctgttcagattctgggatacagagttccctgatccgggcggcacagagtttaaggttgaggtatacgatgccacaggaaaagacggagcaccgggcaagaaaattgcagggccatttaacgcggaagctcttcgcaatggcgagtggactaaggtagatctcagttcaaaagggattatggtcgataaagatttttatctcgtatatatccagtcgaaacctgatccgtattcacctggattggcaatggatgaaaccggccagaattccggccgcaactggcagtatatagatggaaagtggcagccaggtgacaaagcggatggcaactatatgattcgcgcattagttgattatgaagctgctgtacctgagattacttcaccgacagacaaatcatacacaaataaggatagcgtcactgtaaaaggaaacgcttctcctggcacaacggtacacatttataatggagagaaagaagcaggagaaacgaaagctgctgcggatggcacgttccatgcaggcatcatactcaacaagggtgaaaatgagctgacggcaactgcatcaactgacaacggaacaacagatgcctccagcccaatcacggtcacgcttgatcaagaaaagcctgaattaacactggacaatccaaaggatggcgggaaaacaaataaagaaacgctgactgtcaaaggggctgtatccgatgacaatctgaaagacgtcaaggtgaatggcaaaaaagcaacagtagctgatggttcatactcagcccgtattcttttggaaaatggaagaaatgaaatcaaggtaattgctacagacttggcaggcaacaaaacgacgaaaaagacagtcattgatgtgaactttgacaagcctgtcatttccggcttaattccgggagaggataaaaacttaaaagccggtgaatctgtgaaaatcgctttctcaagcgctgaggatttagatgcaacgtttaccattcgtatgccgctgaccaatgcaagagcgagtgtgcaaaatgccaccgaactcccgttaagagaaatctctccggggagatatgaaggctattggactgccacttcttctattaaagcaaaaggagcaaaagtagaagtgatcgtccgagatgattatggaaatgaaacaagaaaaactgcgaatggaaaacttaatatgaacacagaaaattaagtggaaaaaaagctgccgtcattggcagctttttttatatcctctcattatacttcctcgacaaattaagcagatttccctgaaaaattgtattttcctctcaacattaattgacagactttcccacagagcttgctttatacttatgaagcaagaaggggaacagcgtgaggcaagaaagaaaggagtcagatgtgaaaatctatttagatgtcatttggctgttaaacttttgttttgatgcacttttgcttttgctcacggcatttattttaaaacggcatgtaaaaaaaagaagactggtaggcggagcgttcatcggttccagtattgtccttttgatgtttactcctttttcgccgattgttgaacatccggctgggaagctagctttttcagttgtgattgtggtggtgacatttggctttaaaagatttcggtttttctttcaaaatttgttttccttttattttgccacttttttaatggggggaggaattatcggagcccattctttgctgcagtcaaattctattgttcaaaacggtgtcatgattaccaatcaaacagggtttggagacccgatcagctggttgtttattgttggtggctttccagcattatggtttttttctaaaagaagaattgaagatattgaaacaaaaaacattcaatatgaggaacgagtcagcgtgcaggcagatttgggcagccaaacacttcatgtcagaggcctgattgattccggtaaccagctgtacgatcctcttacaaaaacaccggtaatgatcatttacattgataaactggagccgattttcggaacagccgaaacgatgatcattcgaaacacagacccattggaagccatcgaacagctcgatgattcctttcgctttttagataaaatgaggttgattccatacaggggagttggtcagcaaaatcaatttttattatgcgttaaaccggatcacgtaacgattatgacaaaagaagaaatgatttctgcagataaatgtttaatcggtatcagcacaacaaagctgtcggcagatggagagtttgacgcgattattcatccgaaaatgctttcgggcaaggctgtcaaacacgtttcataatgttcgcaaatgtccgttacttatcatactcaaacggcgtgacatttagaagggagaggaagatgaaaaaactgaaattacggttgacgcacctctggtataagctgctgatgaaacttgggctgaaaagtgatgaagtctattacataggcgggagtgaagccctgccgcctccattatctaaagatgaggagcaggttttgttaatgaagctcccaaacggcgatcaggcggcgcgcgccattctaattgaacgcaatttgcgtctggtcgtatatatcgcccgtaaatttgaaaatacgggaattaatatagaggatttaatcagcatcggtaccatcggtctaatcaaagctgttaatacatttaatccagaaaagaaaatcaagcttgctacctatgcctcccggtgtatagaaaatgaaatcctgatgtatttaagaagaaataacaaaatccgttcagaggtttcctttgatgaaccgcttaatattgattgggacggcaatgagcttttgctttctgatgtgctcggcactgacgatgacatcatcactaaagacatagaagctaacgtcgataaaaagcttttgaaaaaagcgcttgaacagcttaatgagagagaaaagcaaatcatggagctgcggtttgggcttgtcggtgaagaagaaaaaacccaaaaggatgtagcggatatgatggggatttctcagtcttatatttcgcggcttgagaaaagaattataaaaaggttgagaaaagagttcaacaaaatggtgtaaaaaattttatggttagaaccccttgattttacagggatttcctgatttcgacagtttttcggtctgagtgcagtgcatatttttcccacccaaggagatacttaacgttgtacagcagctcctgtagggagggaaaaaagtgtcgagaaataaagtcgaaatctgcggggtggatacctccaaattaccagtactcaagaatgaagagatgagaaagctgtttaggcagctgcaggatgaaggcgatgattcagcaagagaaaagcttgtaaacgggaacttgcgtcttgtcttaagtgtcattcaacgatttaataacagaggggagtatgttgatgacttatttcaagtcggctgcatcggactaatgaaatccattgataattttgacctaagccacaatgttaagttttcaacatacgctgtacctatgattatcggagagatccgcaggtatttacgtgataataacccgatccgtgtctcaagatcactccgggacatcgcttacaaggcgcttcaggtaagagagcggttaatcagtgagacaagcaaggagccgactgcagaagacatcgcaaaagttcttgaagtaccgcatgaggaaattgtatttgcgcttgatgccattcaggatccggtttctctatttgaaccgatctataacgacggcggagacccgatctatgtgatggaccaaatcagtgatgagcgtaatacagattcacaatggattgaagagctggctttaaaagagggcatgagaaggctgaacgatagggaaaaaatgattttgagaaagcgattcttccaagggaaaacccaaatggaagtcgccgaggaaatcggaatttctcaagcgcaggtgtccagacttgaaaaagcggctatcaaacaaatgaataaaaatattcatcaataatgaaaagcctttaaaacgatgttgttttaaaggcttttctattgattatggatggtttacgttttggaaaaagtaaggtatcctagttcgtacaaagttttatgaaaattaaaacaattataaaaggcaataaagaggaggaccacgatgattttgcagcttgacaatgtctcactaaaacggaatgggaaatggatactgaaagatattcattggaaggtggaagaaaaggaaaattgggtgctttacggcctaaatggcgccgggaagacagcgctgttaaatatgctttgctcatattattttccaacatcaggcgagatgcaggtgctcggccatgaatttggcaaaacagagcttggggaaaagctcagacgtaaaattggcctcgtctcagcagctcttcagcaaaaattgtatccggcagattcagcttttgaaattgctttgagcggagcttacgcttcgattgggttatatgaaacgccaagtaaggaaaccagggaaaaagcgataggtttgttagaggacttgggagcaattgaatatgccgatcgccgctatgaaaccctttctcaaggggaaaaacaaagagcattgattgctagagcactaatggccgatccggagctgctgatactggatgaaccagtcacaggactggattttattgcccgggaaaagctgttagatacgattacatacattgcaaacaaagaaaatgcaccatctatcctttatgtgactcatcatgctgaagaaattttgcctgtctttgataaagcccttttattaaaacagggagaggtttttggatccggagaaataaaggaaatgcttactgatcaaatactttccgctttttttgatacgccaatccatgtattatggaatcaggatcggccgtttttaacaagagctgagccgataacgaatgcctgacaaatatatatagattcatcctaggggtgctttgcgaagctgagagagactttgtctcaacccttttgacctgatctggatcatgccagcggagggaagcggtgaaaagcggagtacatcggactccgtttgtttttattaagccgtttcatcacatttgaaacggcttttttgattttaaagaataggagcggatttacattggatcaacaaatatactctttgcaaaaaaaagtggaagaacataaggaggagcttattcagcttgcgaaaacgctgatttcttatcaaacacctgctccgcctgcaagaaatacagagggcattcagtcttggattgcgggatatttaaatgaattgggattctcgatcgacaaatgggatgtgtaccctggagatcccaatgttgtagggaagctaaaaggaacagattcagcagattattatagcctgattatcaatggccatgtagatgtggcagaggtaaaagaggatgaagaatggaagcacgatccgtttcatcccattgaaaaaaacggtctcttaatcgggcgaggcgcttccgatatgaagggcggaatggcttgtgtgctgtttgctgtcaaattaattcgtgaagcaagcattgaacttccaggtgatctgattctgcaatcggttattggggaggaagttggagaggccggcacacttgaatgctgcaagaggggctaccacgctgattttgcaattgtcgcggatacgagcgatatgcatattcaaggccaaggcggtgtcattacaggctggatcgaaatcaaaagcagtcaaacatttcatgatggaacgagacggaatatgattcatgcaggcggaggaacattcggagcaagcgcaattgaaaaaatggcaaaaatcattgcggggctcggtgaacttgagcgccactggtctattatgaaaagttatcccggttttaaaccaggcacaaatacgattaacccggcagttatagaaggcggcagacatgcggcttttatagcggacgaatgccggctgtggatcacagtccatttttatccgaatgaaacccatgaccaagtggcagcggaaatagaagattacgtcaatcggctgagtgacagtgatatttggcttagggaaaaccgccctgtattcaagtggggaggctcatctatgatagaagacaggggagaaatttttccggcattggaagttgaccctggccacccaggcgtcttagcgctaactgcctctcatcagaaagtgaaacgggagtgtccaattattgacgtttctcaatcagttacagatggcggatggctgtatgatgccggtattccatgcgtaatatacggtcctggagatctgcacaatgcacactctgtgaacgagaaggtatcgattgagcagctagtagagtatacaaaaattatactcgattttatcatcagctggtgcagccggaaaaaagaacaatgacatgaaaatttcttcttgctgacaaggttcagcctgcccgttcatatacttgaacaaaaggacggaaaaaggacgtgatggaatgatcagcatttcagaatttcaggtaaaggatgtcgtcaatgtctcaaacggaaaaaagctggggagtattggtgatattgatatcaatgtgaccactggaaaaattcaggcgatcatactcggaggaaatgggaaagttctcggattttttggaaaagaagaggaattggtcattccatggcgaaatatagtaaaaatcggggaagatgtaatcttagtccgattaagtgaaccacatgcataaacctgcttgtctgccgcagattggcaaatgccggaagtctcgattcttccggcacatttcatttagaaatatgcaaatcggcgctcaacgaatgcagtaagatgtggtaaaataagtgggaaattccgcttttttaaatgtttgtcgaaaggttggatcatcatgaatacatatcacccattcagtcttaccacaccctcgacactcatgatacaagactgggctcaaacgaatcaaaacaacaaagaggtcattgccggatttacgacaaaaaacggcggtgtcagccaaaagccttttgaatcgttaaatacaggattgcacgttcatgacaaagatgcagatgtagttaaaaatcgtgaatatattgccgatatgtttaatactgatttgcagtcttgggtattcgctgatcagacacatgataatcgcgttcagaaagtgacgcagagggataggggaaaaggcgcccgtgagtatcacacggctctaaaagcaacggacgggatctatacaaatgaaaaaaatgtatttttagcattatgctttgctgattgtgtgcctcttttcttttatgatccggttaagtcgcttgtcggagtcgcccatgccgggtggaaaggcaccgtcaaacagattggcagagaaatggtgaagcaatggactgagaaggaaggttcaaatccctcagatatttacgctgttattggcccgtctatcagcggagcatgctatacggtagacgaccgcgtcatggatgctgtccgcgcattgccggtttcagcagaccttgccgccaatcagacggcaaaggcacaatatcagcttgatctgaaagagctgaaccgtcttatactgatggacagcggtttggcaagtgaacaaatttctgtcagcggtttatgcacggaaagcgagccgtctcttttctattctcatcgccgcgatcaggggaaaactggacggatgatgtcctttatcggaatgaaggaggcataaaagatcttgcgtgttgttgataatttacgacatataaacgaacgaataaacgaagcatgtaacagatcgggccgcagctccgatgaagttacggttattgcagtcacaaaatatgtatcacctgaaagagcacaggaggcagtagatgctggcatcacctgcctcggagagaatcgggatgcggaactgctccgcaaacaggaattgatgaaagggaatccggaatggcattttatcggcagtctgcaatcaagaaaagcaaaatctgtcgtcaattcggtttcctatatccattccctagaccggctctcattagcgaaagaaattgaaaaacgggctgaaggtactgtacgatgctttgtgcaggtcaatacctctcttgagccttctaaacatggcatgaaaaaagaagaagtcattccattcatacaggagctttccggtttcgaacatatccttgttgccgggctgatgacaatggctccgctgactgatgatcaagatcagatcagaagctgtttcaggtcgctgagagaactccgtgaccaggttcagaagctgaaccagccgaacgctccgtgtactgaactgtcgatgggcatgtcaaatgattttgaaattgcaattgaagaaggagctacttatattagaatcggctcatcgttagtcggaaatgaaacagggggtgtacagcaatgagtatgaaaaataaactgaaaaactttttctcaatggaagatgaagaatacgaatatgaatatattgagacagagcgggaatctcatgaggagcatgagcaaaaagaaaagccggcttacaacgggaataaacctgcgggcaaacagaatgtagtgagcttgcaaagtgttcagaaatcctctaaagtggtgttgagtgagccgcgcgtttatgcggaggcgcaggaaatagccgaccatttgaagaaccggcgggcagttgtcgtcaatcttcagcggatacagcatgaccaggcgaagcggattgttgactttttaagcggaaccgtttatgccattggcggcgatattcaaagaatcggctcagatattttcctctgcacgcctgacaacgtagatgtatcaggcacaatttctgagctcatatctgaagacgaacatcagaggtggtaaagcgagatgatcctttatcaagttttttcggttttaagcttattaatcacaatatactcatttgccctgatcatatatatttttatgtcatgggtgccgagtacgagggaaacagcagtcgggcgttttttggcttcgatttgtgaaccatatctcgaaccattcagaaaaatcatccctccgattgcaatgctggatatttcaccaatcgtagcaatacttgtgcttcggtttgcgacaaccggcttgtggggactttatcgcatgattgcgttttaatgtgacagtttgataggggcttggcagcagccaagcctctttacatagaagggaaagacgatgagcgatatatatcagcacttcagaaaagacgagcgggcctttattgatcaagcgctcgaatggaaaagaattgtccaggagcagtaccggatgaagctgaccgactttttagatccccgagagcaggtcatcctctctgctgttacgggacaggcagatgtcgggcttgccttttccggcggctatgacagagcggagcggaaacgggcgattctgtttccagagtacattactccggaagaatcagattttgaactgcaggcgtttaacgtccgttatgctgacaagtttgtctcagtagatcatcgttctctgcttggtgcattaatgggcataggattaaagcggcaaaaattcggtgacatcgtgttttctgagacagcagtgcaattgattgtctcagccgataccgctgattttgtggctgcacagctgacccaagcaggcaaagcggcggtcagcctagagaaaatcgacttgtcagaccttaacattccagcagttgatgtcgaaataagagatgacacggtttcttctttaaggcttgacgccgtctgcgcctctatgagcaggcaatcccgccagaaatcacagacgcttgtgaaaaacggccttgtgaaagtgaactggaaggtggttgaagatccttcatacatagtcgcggaaggggacatgctgtctatcagaggttttggccggtgcagcttaacaaaaatcgaaggaaaaaccaaaaaagacaaatggagagttacgtttgaacgacaaaaatagtcggtttttcagtttttttctccatctgtgcgaaatttgttttataatgtgaactagataaccgtactgaaatgtaaaaatggaggtggcatcatgccattaacgccaaatgatattcacaacaagacgtttacaaaaagttttcgcggatatgatgaagatgaagtaaatgaattcctagcccaagtcagaaaagattacgaaattgttctccgcaagaaaactgagcttgaagcgaaagtcaatgagcttgatgaaagaatcggacactttgccaatattgaggagacattgaataaatcaattttagttgctcaagaagcggctgaagacgtaaaacgcaattctcaaaaagaagcaaagctgatcgttcgggaagcggagaaaaacgctgatcgcattatcaacgaatcgttatcaaaatcaagaaaaattgcaatggaaattgaagagctgaaaaaacagtctaaagtgttcagaacacgtttccaaatgctgattgaagctcagcttgatcttctgaaaaatgacgattgggatcatctccttgagtatgaagtcgacgctgtatttgaggaaaaggaataaattctctgattatcttgacattttcttagcttgtcgaatataatacgttcataaattcagatgaaaaaacggttgaaagggacagtcatgtttccttcaggccttcatagcgacccggagatggtgagagtccgggatggccggaatcatgtagatcagccctttagtttccttgctgaactcacagtaggttaggacgttcatcacgttacgatgctcaagaggaaaaagtgtatgcttgctttttctaaaagggtggtaccgcgagataagctttctcgtcccttatgggatgagagggctttttttattttctgaaaaaatgcagtggaggaatgaaaatggattttaaagacacgctcttaatgccgaaaacagatttcccgatgcgtggaaatttgccaaaccgtgagcctgacattcaaaaaaaatgggaggaagaagatatctaccgtcttgttcaggaacggacgaaagaccgcccgaaatttgttttacatgacggacctccgtatgcaaacggcgacatccatatgggccatgcacttaacaagattttgaaagacttcattgtccgctataaatcaatgagcggctacaacgcaccgtatgtgccgggctgggatacacacggattgccaattgaaacagctctgacaaaaaacaaaaaggtcaaccgcaaagaaatgtcagtagcggaattccgcaaactatgcgaagagtacgcttggaagcaaatcgagggacagcgtgagcaattcaaacgtcttggtgtccgcggtgactgggaaaacccatatgtgacattaaaaccggaatacgaagcgcagcaaatccgcgtatttggtgaaatggcaaaacgaggctacatttacaaaggccttaaaccggttaactggtcaccttcaagtgagtctgctctggctgaagccgagatcgaatatcaagataaacgttcagcatctatttacgtcgcttttggtgtaaaagacggaaaaggcgttcttgaaaacggcgagcgcatcatcatttggacaacaacgccgtggacaattccggcgaacctcggaatctcagtgcaccctgatcttgagtacagcgtgattgcagtaggtgaagaccgctttgttgtagcaagtgccttagtcgaaaatgttgcatcggcatgcggatttgatcagtatgaagtgacaagaacggtcaaagggaaagaccttgagaacattatcgctgaacacccgctatatggcagagactctctcgttatgcttggtgaacacgtaacaactgatgccggaacaggctgtgttcatacagcgcctggacatggggaagatgactttatcatcggccaaaaatacggtttagatgtgctttgcccggtcgatgaaaaaggtgtaatgacaagcgaagctcctggctttgaaggcatgttctatgatgatgcaaacaaagcgatcacacagcagcttgatgaaaaaggcgcacttgtgaagcttgaattcattactcattcttatccgcatgattggagaacaaaaaaaccaaccattttcagagcaacagcgcaatggtttgcgtctattaaagatttcagatcagacctgctggatgccattaaagaaaccaaatgggttcctgaatggggcgagcagcgtttgcacaacatggttcgggaccgcggagactggtgtatttccagacagcgtgcgtggggtgtgccgattccggtattttacgctgaaaacggagaaccggttattacagatgaaaccattgaacatgtttctgaattgttcagacagcatggatcaaacatttggtttgaaaaagaagcaaaggatcttcttccggaaggctttacgcatcctggcagcccgaacggcacatttacaaaagaacaggatatcatggatgtttggtttgattcaggctcttcacatcaagcagtgcttgaagaacgtgatgacctcgttcgcccggctgatctatacctagagggatctgaccaatatcgcggctggtttaactcttctctttctacagcagtagccgtaacagggaaagcgccgtataaaggtgtgctcagccatgggttcgcactggatggagaaggacgtaagatgagtaaatcaatcggtaacgttgttgttccggctaaagtcatgaaacagcttggtgccgacatcttaagattatgggtatcttcagtggattatcaggcggacgttcgcgtgtctgacgccattctgaagcaggttgcggaagtatatcgtaaaatccgcaacacgttccgtttccttcacggcaaccttttcgattttgatccaaaaacaaatgcggtggctgtcgaagatcttcgcgaagtggatcagtatatgctgattaagctgaacaagctgattgataaagtgaaaaaagcgtatgatgagtacgaatttgcggttgtgtatcacagcattcataatttctgcacaatcgaattgagctcattctaccttgattttgcaaaagatattgtctacatcgagcatgcggatcatccggatagacgcagcatgcagacagtattctacgaaacgcttcttgcattagtgaagctttcagcgcctatccttccacatacggcagacgaattgtggtctcatttaacatttgttgaagagcagagcgttcagttgaccgatatgccggaaacaatcacggttccaaacagtgaagcgactgaagaaaaatttgaccgctttatggctcttcgtgatgacgtgttaaaagcattagaaactgcgcgaaatgaaaaaattatcggtaaatctttggaagcaaacctgaaattgtatccaaacaaagaaaacaaggagctcttggcttccataaaagaaaacctttctcagctgtttattgtgtctgaactgacaatcagcgaagaaaatgaagcgccgaacgatgcgcaaagctttgcgacgggtaaaatcgctgtcgagaaagcggaaggcgaaatgtgtgagagatctcgtgtgatttcaaaagatgtaggggcaaatccgaaatatcctacactttcattacgcaacgctgaaatcgttgaaaaatactatcaaaaataatgcaaaagagcccggcgtaaaagccgggctttttttgtgccaagagtgacatcctttagaacgaaaggaaaaatcttatgggctttagatcatcattcacaggcaacaataaagatactacgttaagagcaggagttgtgaagaatgaatgatcaactgaccgcaatttatacggaacttcttctgatgaaagaagaattacagtcgagattatttgagtattcttgctttcaggtttctacaagcccgcaagcagcaatcaatcaaaaacaaaaagcaactctgatctatcatattaaagaagaacttcaagacgttctccttgcattgtccaaaatcgaaaacggcacattcggatactgtgaagaaactggggcccccattcctcttgcaaagctggcagtgctgccgacggcccgaacagcaaacgattttctttattctgtccaatttgagaaaaaaacgcttccgatatggaaatcaacggatatcgaatatggtcaggcactgtatgaataacagtgtctgtccggttaatatgcctgatatttctttactccagtgctttttattgataaaatgcataatggattaaagtaaccgtaaactggaggaacgtttgtgctgtattatatgattgcactacttattattgcagccgatcaattgacaaaatggctagttgttaagaacatggaacttggccaaagcattccgatcattgatcaggtattctatatcacctcccatcgcaatacgggtgctgcatgggggatattagcgggtcaaatgtggtttttctacctcataacaaccgctgttattattggtattgtttattacatacagcgttatacaaagggacaaaggcttcttggcgttgccctcggacttatgcttggcggtgccatcggcaactttatcgatcgggctgtcagacaggaagttgtggattttatccatgttattattgtcaattacaattacccgatatttaacatcgcggactcttcactatgtgtcggcgtaatgcttttatttatacaaatgctgttggacagcgggaaaaagaaaaaggagcaatagcatgaatcaaattgatataaccgcttcagaagaacaaaaaagtgagcggattgataaatttttggcatcgactgagaatgattggtcaagaacccaggttcagcaatgggtaaaagacggacaggttgtcgtgaacggaagcgcggtgaaagcgaattataaaattcagccgggtgatcaggtgaccgtcactgtacctgaaccggaagcgctcgacgtcctggcagagcctatggatctggatatttattatgaggaccaggatgtgctggtcgtcaacaaacctcgcggaatggttgttcacccagcacccgggcatcttacgggcacacttgtaaacggtcttatggctcattgcacagacctttccggaataaatggtgtgatgcgcccgggtattgttcacagaatcgataaggacacgtccggtttattaatggtggcgaaaaatgatatggcgcacgagtcactcgtaaaccaattggtcaacaaaacggtcacgcggaaatatacggcggttgtccacgggcttatttctcatgatgacggcacaattgacgcgccgatcggacgggataaaaaagaccgtcaaagcatgactgtgacacgtgatggcaaaaacgctgtcactcattttcatgtgcttgagcgttttcaggattttacgttagtggagtgccagcttgaaacagggagaacccatcaaattcgtgttcatatgaaatatatcggattcccattagcaggcgatccgaaatacggcccaagaaaaacaatcgactttaatggccaagcgcttcacgcgggagttttaggttttgaccatccacgaacaggagaatatgtcgaatttgaagcgccgcttcccgaggatatggcagaattaatcgaaaacctcagaaaaaacggttgacagagggtttcttttctgaaataataaacgaagctgaatagattctttaaaacagtccagagaggctgagaaggataacggatagacgggatgcgtgtataggcgcgcaccttgtcctaaaacccctctatgctctggcaggaggggttttttcttctatatgaactgtgaggtgtcacacattgaatcaaaaagctgtcattctcgacgaacaggcaattagacgggcgctgaccaggattgctcacgaaatgatcgaacgcaataaaggaatgaataactgcattcttgtcggcattaagacaagagggatttacctggcaaaacgccttgcggaacgcattgaacagattgagggaaatcctgttacagtcggtgaaattgatattactctttacagagatgatctttctaaaaaaacaagcaacgatgaaccgcttgtaaaaggtgcagatattccggtagatattacagatcaaaaagtcattctcgttgatgatgttctgtataccggaagaacagtcagagcaggaatggatgcgcttgttgatgtaggcagaccttcctccattcagcttgcagtgcttgtggacagaggacaccgggagctgccgatccgagcggattatatcgggaaaaacatcccgacatcaaagtctgaaaaggttatggtacagcttgatgaggtagaccaaaacgatctcgtcgccatttatgaaaacgaataatagatcacctttttaagggcaatccagagaggttgcaaagaggtgcacaacaaaggcccaaaaagtattcggcaggtctttgtatgcctctttgcgtaaaaaagcaaagaggtttttttatacagtcattgagtcatcctaaaatgaaagtcaacaatcagggggaaatcatcatgagtaagaaaaaagtaaatttaggggtcagggatgtcccgacacctttctcttgggtttcattcagccttcagcatttgtttgccatgtttggctcaaccattttggttccgaagctcgtcggaatgagtcctgctgtggcgttggtgacaagcggcatcggaacactggcgtaccttcttattaccaaaggacaaattccggcgtatctcggttcatccttcgcctttatttctccgatcattctggtaaaagcgaccggcgggccgggagcggcaatggttggagcgtttcttgcagggctggtgtacgggctgattgccttattgattaggcagcttggaacaggatggctgatgaagattctcccgcctgtagtcgtagggcctgttattatcgtcatcgggctgggactggcaagcactgcagtaaacatggcgatgtatgctgatccgaacgcgagtgagttggtctacagcttaaagcactttagtgtcgcaggagttacgctggcaattacgattatttgtgcgattttcttacgagggtttttaagcctgattccggttctgatcggaatcatcggcggatacctgtttgcccttactcaagggattgtcaacttccagccggtgcttgacgcgaaatggtttgcagtgcctgaatttatcattccgttcaaagattattcaccgtcagttacgctcggcatcgcagccgcaatggttcctgtcgcatttgtcacaatgtcagagcatatcggccaccaaatggtgctgagcaaggttgtcggacaagacttcattaaaaagccaggtcttcatcgctctattatgggtgacagtgtggcgacaatcctcgcttccctgatcggcggccctccgacaacgacttacggagaaaacattggcgtgctggccatcacaagagtattcagcgtctttgtcatcgggggcgcggcagtgattgccctttgcttcggctttatcggcaaaatttcagcgctgatcagttcagtgccgtcagcggtcatgggaggcgtctccttcctgctgttcggaatcattgcttcaagcggcctgagaatgctgattgacaacaaaattgattatgaaaacaacagaaacctcattattacatcagttatccttgtcatcggtgtaggaggcgcttttatccaagtgtctcagggcggattccaagtgtcaggaatggcgcttgccgcaattgtcggtgtcatcttaaacctgattcttccgcaggcgaaggaagagcaggcagacacatctgaacaacatcatatttaaaaccttttaatgaaagtccagagaggcttggaagggttatgaagagaaggaagcttcaatgctgccctctatttaaccataccccgagtctatcttagaccggggttttttttcagccttaagttgaaaagagaggggaaagaacatgaagcatttaacgacgatgagtgaacttagcactgaggaaatcaaagatttgcttcaaacagcacaagagctcaaaagcggaaaaacagacaatcagcttacaggaaagtttgcagcaaacctgtttttcgaaccgagcacgagaacgcggttcagctttgaggtcgcagaaaaaaagctgggcatgaatgtgcttaaccttgatggaacaagcacaagcgtgcaaaaaggcgaaaccttatatgacacgatccggacgcttgaatcaatcggtgtggacgtctgcgtcatcaggcacagtgaggatgagtattatgaagagcttgtcagccaggtgaacattccgattctgaatgcgggagacgggtgcggccagcatccaacacaatcactgcttgatttaatgacgatttatgaagagttcaatacgtttaaagggcttaccgtctccattcacggcgacatcaagcatagcagagtggcaaggtcaaatgcggaagtgttgacaagattgggtgcccgggtcctattttccggcccttcggaatggcaggatgaagaaaatacattcggcacgtatgtctcaatggatgaagcagttgagtcttccgatgttgtcatgctgctgcgcattcaaaatgaacgacatcagtccgctgtcagtcaggaaggctatttaaacaaatacggcttgaccgtagaacgggctgagcgtatgaagcggcatgcgatcatcatgcatcctgctccggtaaacagaggagtggagattgatgacagcttagtagaaagcgaaaaatcaagaatcttcaagcaaatgaaaaatggcgtatttatcagaatggcagtgatacagcgtgccttacaaaccaatgtgaaaagaggagaagcagcgtatgtcatatctcattaaaaacggctggatactaaacgaaaatggtgaaaaaacacaagcggatatccgagtgactggagaaaccatcaccgcaatcggcaagcttgatgcaacggataatgaaacggtaattgatgcaaaaggtttgctcgtttcacctgggtttgttgatctccacgtgcatttcagagagccgggcggagagaaaaaagaaactattgaaaccggggcaaaagcagcggcgcgcggcggctatactacagtagcagcaatgccgaatacgcggccggttcctgatacaaaggagcagatggaatgggtgcaaaacagaattaaagaaacatcatgcgtaagagttcttccatatgcatccattacgatcagacaaatcggcgatgaaatgacaaactttgaagcgttaaaagaagccggggcatttgcttttacagatgacggcgttggtatacagacagcaggaatgatgtatgaagcgatgaaacgggcagccgcaattgacaaagcgattgttgcacattgcgaggacaactccttaatttacggagggagcgtacatgaggggacattctccaaagcgaacgggctaaacggcattccttctgtgtgtgaatcggttcatattgctcgcgatgtgctgctggctgaggcggcaaactgccattatcatgtatgccatatcagcacaaaagaatctgtcagagttgtacgcgatgcgaaaaaagcgggaatcagagtgacagcagaagtatcgccgcatcatttgctgctttgtgatgaggacatcccggggctggacacaaactataaaatgaatcctccgctccgcagcccagaagacagagctgctttaattgaaggtcttttagacggaacaattgattttatcgcaacagaccatgcaccgcatacggaagaagagaagaacacagaaatgaagctggcgccattcggaattgtcggcttagaaacagcattcccgcttctttacacacactttgtcaaaaatggcagctggtcactgaagcagctgattgactacatgacaatcaagccatgcgaagcgttcggtctcccatatggaacattacaaacggggcaagctgcggacattacgttaatcgatttagaaaaagaagcagttatagacaaagagacatttttatcaaaaggaaaaaatacaccattcaacggcatcagttgcaccggctggccggtcgctacaattgcggcagggaagcttgcttatgaagaggggagacttgtcaaatgaagagacgattagtactggaaaacggagcggtattcgagggagaagctttcggaagcttagaacacaacatgggagaagtcgtttttaatactgggatgacaggctatcaggaaattttatctgatccttcttactgcggacagatcgtaacattaacatacccgcttatcggaaattacggcattaaccgtgatgattttgaatccattaccccttttgtcaaagggctgatcatcaaagaattatgtgagctgccttccaactggcgttcagcatacaccttagacgagtatttaaaaatgaaaaacattcccggactccagggaattgatacaaggaagctgacaagaatgatccgcacggcaggcgcgctaaaaggaacattcgcttcatctgatgaagatatcgaagcagtgctgaaaagactgaacgaaacggaattgccaagaaatcaagtatcccaagtatcagcaaaaacagcatatccgagcccgggaagaggcaaacgcattgtcttggttgacttcggcatgaaacacgggattctaagagagctgaacaaacggaaatgtgacgtcatcgttgtgccttacaacattacagcggaagaggtgcttcagctgaaaccggacggtatcatgctttctaacggacctggagacccgaaggatgtgcctgaagcgattgaaatgattaaaggtgttcttggaaaagtgccattattcggaatatgtctcggccaccaattattcgcgctggcgtgcggggcgaatactgaaaaaatgaaattcggccacaggggctcaaaccacccggtaaaagagctggctacaggaaaagttgccttaacatctcaaaaccatggatatacagtttcgtctatcagtaaaacagaactggaagtgacgcatatcgcaattaacgacgatacgattgaagggctgaagcataaaacattgccggcatttacggttcaatatcatcccgaagcctcacctggtcctgaggatgccaaccatctatttgacagattcatcgaaatgatcgaaacaacagagaaagaaggggaagcggtatgccaaaacgcgtagacattaacaaaattttagtaatcggatctggaccgatcatcatcggccaagcagcagaatttgactatgcgggaacacaagcctgtcttgctttgaaagaagaaggctatgaagtcatccttgtcaactcaaaccctgcaacgatcatgacagatacagaaatggctgaccgggtttacatcgaaccgctcacacctgaattcctgacacgaatcatcagaaaagagcgcccggatgccattcttcctacactcggaggccaaaccggtttgaatcttgcggttgagctttctgaaagaggcgttttggcagaatgcggcgtcgaagtgcttggcacgaaactgtctgcgattcagcaagctgaagaccgtgacttgttcagaacattaatgaatgaactgaatgaaccggtgcctgaaagtgagattatccactcccttgaagaagcagaaaaattcgtcagtcaaattggattccctgtcattgtccgcccggcatatacattaggcggaacaggcggaggcatctgctcgaatgaaacagagctaaaagaaatcgttgagaacggcttgaaattaagcccggtacaccaatgtctgcttgaaaaaagcatcgccggctataaagaaatcgagtatgaagtcatgagagacagccaggatcacgccattgtcgtttgtaacatggaaaacattgatccagttggaatccatactggagacagtattgttgtcgcgccgagccaaacgctcagcgatcgcgaatatcagctcttgcggaatgtatcgttaaaactgattcgcgcgcttgggatcgaaggcggatgtaatgtccagctcgccttagatccagacagcttccaatattacattattgaagtaaatccgcgtgtcagccgttcatctgcccttgcatcaaaagcaacggggtacccgattgcaaagctcgctgctaaaattgcagtcggactttcattagatgaaatgatgaacccggtgacaggaaaaacatatgcagcatttgaacctgctcttgactatgtcgtatccaaaattccgcgctggccgtttgataagtttgaatcagcaaacagaaagcttggcacgcaaatgaaagcgacaggtgaggtcatggcaatcggccgcacgcttgaagagtcattgctgaaggcagtgcgatcactggaagcggatgtgtatcatcttgaattgaaggacgccgctgacatttcagatgagcttcttgaaaagcgaattaaaaaggccggtgatgaacgcttattctacttagctgaagcgtacagaagaggctacacggtagaagacctccatgaattttccgctatcgatgtcttcttcttgcataagctgttcggaatcgtacagtttgaaaaagaattgaaggccaatgcgggcgatacagatgtgctgagacgggcaaaagaactcggcttctctgatcagtacatcagccgtgaatggaaaatgaaagaatctgagctttacagcttgagaaaacaagcggggattgcgccggtattcaaaatggtagatacatgcgcggcggaatttgagtcagaaacgccatacttctatagcacatatgaagaagaaaatgaatctgtcgttacagataagaaaagtgtgatggtgcttggttcgggtccgattcgaatcggtcagggtgtcgagttcgactatgcgacggttcactctgtatgggcaattaaacaagcaggctatgaagccattattgtcaacaacaacccggaaaccgtttcaacagacttcagcatctcagacaagctgtattttgaaccgcttacgattgaagatgtcatgcacatcattgacctcgaacagccaatgggcgttgtcgtacaatttggcggacaaactgcgattaaccttgctgacgagctttctgcacgcggagtgaaaatccttggaacttcattagaagatttagaccgtgccgaagaccgggataaatttgaacaagcgcttggagaacttggtgttcctcagccgcttggcaaaacagcgacatcagttaatcaggcggtaagcatcgcaagtgatatcggttatccggtactggtacgcccttcctatgtacttggcggccgggcgatggagattgtttaccatgaagaggaactgcttcattacatgaaaaatgcagtcaaaatcaatccacagcaccctgtattaattgatagatacttgaccggaaaagaaattgaagtcgatgcagtatccgacggtgaaacagtcgtcattccgggaattatggagcacattgaacgtgcgggcgttcactccggagactcaatcgctgtttatccgcctcagtctctcacagaggacattaagaaaaaaattgaacaatacacgatcgcattggctaaagggctgaatattgtcggtttgctcaatattcaattcgtcttgtcgcaaggcgaggtgtacgtgctagaagtgaatccgagatcaagcagaaccgtaccgtttttaagcaaaattacgggtatcccaatggcgaatctcgcaacaaaaatcattcttggtcaaaagctggctgcgtttggctatacagagggccttcagcctgaacagcaaggtgtatttgtaaaagcgccggtcttctcctttgccaagctgagaagagtggatattacgttagggcctgaaatgaaatcaacaggtgaagtcatggggaaagattcgacacttgaaaaggcgctctacaaagccttgatcgcttcaggtattcaaatcccgaactacggttccgtgcttttaacagtagctgataaggacaaagaagaagggcttgccattgctaagcggttccacgcgatcggctacaacattttagcgacggaaggaacggcaggctacctgaaagaagcttccattccagcgaaggtcgtcggaaaaatcggtcaggatggcccgaacttgcttgatgtcatcagaaacggagaagcgcagtttgtcatcaatacgctgacaaaaggaaagcagccggcaagagacggttttagaatcagacgtgaatcagtagaaaatggtgttgcctgcctaacatctttagatacggcagaggcgatattgcgagtgctggaaagcatgacattccgtgctgatcaaatgccggcagtcaacacaaatcaggaggcggcagtcactatatgaaaaaagcgtatttgacagtatgttctaaccagcaaattgcagaccgggtgtttcaaatggttctgaaaggggagcttgtccaagggtttacaacccctggacagttccttcatcttaaagtgagcgaagcggttacgcctcttttgagaaggccgatcagcatcgcagacgtcaactttgaaaaaaatgaagtcaccatcatttatcgggtagatggggaagggacaagactcttgtcactgaagcagcagggagaacttgtggatgtcctcgggcctttgggaaatggctttcctgttaatgaagttcaacccggaaagacggctttgctggtaggaggcggagtaggtgtgccgcctctccaagagctgtcgaaacgcttgattgaaaaaggggtaaatgtcatccacgttttaggattccaatcggcaaaggatgttttttacgaggaagaatgccggcagtacggagacacgtatgtggcaacagctgacggaagctacggggaaaccggatttgtcacagatgtgattaaacggaaaaagctagagtttgatatcctcctcagctgcgggccgacaccgatgctcaaggcgttaaaacaggaatatgcccataaagaagtatatctgtccatggaggaacgaatgggctgcggaatcggcgcatgcttcgcgtgtgtgtgccatacaaacgaaagtgagacatcctatgtaaaagtatgtctcgacgggcctgtatttaaagctcaggaggtggcgctgtaatgctagaggtgaaattgccgggacttgatttgaaaaacccaatcattcctgcatcaggctgcttcggttttggaaaagaattttcacgtttttatgatttgtcttgtcttggagctatcatgattaaggctacgacaaaggagccgcgctttgggaatccgacgccgcgggtagctgagactggtgctggaatgctcaatgcgatcggtctccaaaatccggggctggatagtgtgttgcatcatgagctgccgtggcttgagcagtttgatacaccgatcattgccaatgtcgcaggttctcaagtcgatgattatgttgaagtcgcagaacatatcagcaaagcgcctaatgttcatgctcttgaattgaatatttcctgcccgaatgtgaaaacaggcggaatcgcttttggcacgaatcctgaaatggctgccgatttgacaaaagcggtgaaagaggtttcggatgtacccgtttatgtgaagctatccccgaacgtggctaatatcacagaaattgcattagcgatcgaggaagcgggagcggacggtcttacgatgatcaacacactaatcggcatgagactcgatttaaaaaccggcaaaccgatattagcgaataaaacagggggactttcgggccctgctgtgaagccggttgccattcgcatggtgtatgaagtcagccagatggtcaacatcccgattatcggaatgggaggcgtgcaaacggctgaagatgccctggaatttcttctcgcgggagcaagcgcagtcgctgtcggaacagcaaactttgtgaatccttttgcatgtccagagattattgaacagctcccatctgttttgctccaatacggctatcaatcaattgaagaatgcatcggaaggagctggaatcatgaaaaacaacctgcccatcatcgcgcttgattttgcgtcagctgaagaaacacttgcgttcttagcgccttttcagcaagaaccgttatttgtaaaggttgggatggagcttttttatcaagaagggccatctatcgtgaaacaactaaaagaaagaaactgcgagctatttttagatctaaagcttcatgacatcccgactactgtaaacaaagcgatgaagcgccttgccagtcttggagtagacctcgtcaatgttcatgctgccgggggcaaaaaaatgatgcaggcagctctcgaaggcttagaagaaggtacgccggctggaaaaaaacgtccgtcacttatcgcggtaacccagctgacaagcacatctgaacaaatcatgaaagatgaactgctgatcgaaaagtctctgattgatacggttgtgcactacagcaaacaggcggaagaaagcggactggatggagtggtctgctctgttcatgaagcaaaagccatttaccaagcggtgtcgccttcatttctgactgtcactccggggatcagaatgtcagaggacgctgcgaatgaccaagttcgcgtagcgacgcctgccattgcaagagagaaaggttcatcagcgattgtagtaggacgctcgattacaaaagcggaagacccggtaaaagcctataaggctgtcagacttgaatgggagggaatcaaatcttgaaacaaatcatcgcaaaacatctattagacatccaagctgtatttttacgcccgaacgagccgttcacatgggcaagcggcattttatcaccgatctactgtgacaaccgccttacgctatctttcccagaggtcagaaacgatgttgcttcaggtatcagcaagcttgttaaagagcattttcctgaagctgaaatgattgcgggaacagcaactgccggtattcctcatgctgctcttgcggcggaccatttgaatcttccgatgtgttatgtgaggagcaagccgaaggcgcacggaaaaggcaatcagattgagggagctgtgcaagaagggcaaaaaacagtcgtcattgaagacttaatttccacaggaggcagcgtgcttgaagcttgtgcagctttacaagcggccggctgtgaagtgcttggtgtcgtctcaatctttacgtacggacttcctaaagcggaggaagccttcgcaaaggcagaactgccatactactcattaaccgattatgatacgctcacagaggtcgcgcttgaaaacggaaatattcattcagatgatctaaaaaagctgcaaacatggaaacgaaatcccgagtcaaaagattggtttaaaaaataaaaaataaattcaaatgatgtaaagaggcttcaaagccttgctgtacttgaaaacaggctgtgaggcctgtttttttattaatcctataaaaaaagtcgggttgacttatgttagaattgtgctaaaatttactacaaatctaaaaacttatcaagagcggctgagggactggacctatgaagcccggcaacctgcatagtttgtaaggtgctacttccagcaaaatgaattccattttgaaagataagggctgcatgctgttcctgtctttctttccgccggattgaaagttttttattttaagaggtaaaaaggctatctgtatatcagcagccgcgaatcacattacatgggaaaagacaaccggcagaaagctactgtttgtttgtctccgaaaggaggaaagaagaaatgttaacgtatgataattgggaagaaccaacgattacatttccggaagacgatccttataaaggagcgctgtcagttttaaaatgggcatacggccattacggcgatcagcttgtttatgcctgcagtttcggaattgagggaatcgttctgattgacttaatttataaagtgaaaaaagacgcagagattgtgtttcttgatacaggacttcattttaaagaaacctatgaaacaattgaacgagtgaaagagcgttatccgggtcttaatatcatcctgaaaaaaccagatctcacccttgaggaacaagccgaagaacatggtgacaaactatgggaaagagagccgaatcagtgctgctatcttagaaaggtcgttcctttaagagaggcgctttcaggacatccagcctggctttccggcctgcgccgtgatcaagggccaagccgtgccaatacgaatttcttaaacaaagatgaaaaattcaagtcagtaaaagtttgcccgcttatccattggacttggaaagacatttggagatatacatcccggaatgaactggactacaatccgcttcatgaccaaggctatccaagtattggctgtgcgccttgcacttctcccgcttttacagcagaagatttgcgctcaggcagatggaatggtatggcgaaaacagaatgcggactgcatgaataaggagctgcaaaatggaattagccgctattttatttagcttgtttttcgcgatgaatattggtgcaagcggcgctgcagcttcgatgggggttgcttacggctccggagccatcaaaaagaaaacttacgctttgatcctatgcgcagtcggtgtctttgccggggcggtcattggcggaggcgaggttgtaaaaacaatcagctccggcattattcctgagcagacgattacactgacgattgtttgcatcattattggagctgctgccctgtcgctctttactgctaatctgctcggcattcctttgtcgacaagtgaagtaacagtcggcgcggttgtcggcgtgggagtggcttataaagtattgtttgtgaacaatcttctgatcattgtgtcattttgggtttttgtcccgctgttcgctttcggcttcacctatttcgtatctaagctgtttcgttattttaagattgaagtaaaatcttctaaaaagcaaaaaatcctcggcattgttttgttagttgccggatttttcgaagcattctctgccggcatgaataacgtggcgaatgctgttggcccgttagtagctgccggtgtgcttgatgtcggaaaaggaaccttgtatggaggagcttttgttgctcttggcgcactgttattaggccggcgagtgctagaaacaaacgggaagaaaattacgaggttctccaaaggggaaggcattctcttatccggtacaggagcgggactggtgatcatcagttctgtatttgggatgccggtgcccttggcgcaagtcacgtcatcgtctattatcggaataggcatggcgaaaaacggtccgaacgtgttccataaacaagttgttcaaacgatgctgaaggtatggatcgtatcgccgtttttatctttatcgatttcttatctgcttgtatccttgtttttaaaagcagattattattcgatctttatcatggtaagtgtgcttttagcggcgggcggtgccatcagcctgacaaaggccattcgtaaagagagacgctcagtccacgaacaaggcgggggaatctgatcattaatctgagtaattttataagttaactaggaggagatggatattatgagcttagcaccacacggaggaacattagtaaacagagtagatgaatcatatgatgtgagcggcattcaaaaagaaattgaacttgatttaatttctttcgcggatttggaattgatcggtatcggtgcatacagcccgattgaaggtttctttaatgaaaaagattacgtatcagtggtcgaaaacatgcgtctttcttccggcgttgtctggtctcttccaatcacgcttccggtcgatgcgcaaaaagcagcggaactgtcacttggtgaaacggtaaagttaacgtatgaaggagaaacttacggcgttatccaaatcgaagacctgtacgtgcctgacaaacaaaaagaagctgtcaatgtgtacaaaacagatgaacaggagcatcctggtgttaaaaagctgttcagccgcggcaatacatatgtcggcggaccgattacgttgattaaaaaagcttcaaaacagttccctgaatttacatttgaaccgtcagaaacgagacgccagtttgcggaaaaaggctgggaaaccattgtcggtttccaaacaagaaaccctgttcacagagcgcatgaatacattcaaaaaacggctcttgaaacagtagacggcttgttcttgaatccgttagtaggtgaaacaaaatctgatgacattccagctgatgtacggatggaaagctaccaagtgcttcttgatcattattacccgaaagatcgtgttttccttggtgtctttttagcggcgatgcgttatgcaggcccgagagaagcaattttccacgcgcttgtcagaaagaactacggctgcacacatttcatcgtcggccgtgatcatgcaggtgtaggcgactattacggaacatacgaagcacaggaactgtttgacacatttaaacctgaagaactcggaattacaccgctgaaatttgagcacagcttcttctgtaaaaaatgcggaaatatgggaacagcaaaaacttgccctcatggcagagagcatcacgtcattttatcaggcactaaggtaagaggtatgctgagagacggtgtgctgccgcctgctgaattcagtcgaaaagaagtagtagaagtgttaatcaaagggatgaagaaaaaagaagaagtaggcgtatcttaaggaggactggcagtgacaaatcgcgatattgtatggcatgaagcctctatcacaaaagaagagtatcagcaaaaaaacaagcataaaagctccattctctggctgacagggttaagcggctcaggcaaatcaaccattgccaacgccgctgcgagagaattgtttgagcaaggctaccaagtcattgtgctggacggggataatatccgtcacggcctaaatagggatcttggtttttctgatgaagaccgaaaagaaaacatccgccggatcggagaggtggcgaagctttttgttcagcagggaaccattgtgattactgcttttatctctcctttccgcgaggacagacaacaggttcgcgagcttgtggaagcgggcgaatttaatgaagtctacattaaatgcgaccttgatatttgtgaacaaagagatccgaaagggctttacaaaaaagcaagaaacggcgagattccgttctttacaggaattgattctccttatgaagaaccggaagctccagagctcgttcttgattcaggacagcatgaccgtgaagcgtgtaaaaatcagctgatcgagtttgttaaacaaaaattgagctgaatatgatctgctgcgttcttctcagatgccggaatgcaagcgagaacatcatcacagcgaatcttctggaagaactcgaatagatcgggggaaatacgatggggaaagtatatattgtaggagcgggtcccggtgaccctgatctgctgacaattaaagcgctgaaagccattgaaaaagctgatgtcatcttatatgacagattagtaaataaagagattttacaatatgccaaagagcaagcagacctgatctactgcgggaagcttccggattttcatacgatgaagcaggaaaccatcaatcgatttcttgtgaagtatgcgcaaaaagggaaaatggttgtcagactgaaaggcggagacccttttgtgttcgggagaggaggggaagaagcggaatgcctctctgaaaatggaattccgtttgaaatcattcccggcattacgtctggaatcgcggcagccgcttatgccgggattcctgttacccatcgggatgcgggctctaacgtcgcttttgtaacgggtcactataaaaaagaagaagattttgaggaaaagtggaaagcgctggctacaggaattgatacacttgtcatctatatgggtatcaaaaacgtgcagcagattgaaagaaaactccttgaaaatggccgggacggttctacgccagcagcctttattcattgggggacaacggacaagcaaaaatctgttttttgtacagttgacaccctttcagaaacggtgataaaagaaaacattacaaatccgagtttaattgtcattggaaatgttgtaaattatcactataagctggaatggtttgaatctgaactaaaaaaacaagatttaagcgaggcgttgtaaaaatgaaacaagcaattttatatgtcggccacggcagccgggtcaaaaaagcgcagcaagaagccgcagcctttttggaaggatgcaaggcccacatctctgtgccagtacaagaaatcagctttttagagcttcaggagccgacaattgagacaggatttgaagcatgtgtgaagcaaggtgccactcatatcgcagtggtgcctctgcttcttttaacagctgcgcatgcaaaacatgatattccggaagaaattgtccgtgttgcatctcgatatccatcagtccgtatttcatacggaaagccgatcgggattgacgaagaagtagtcaaggctgtatatcaccgaatgaaagacataggtgttccgtatgaaaatgccagagtggtgctcatcggaaggggaagttcagatccagacgtcaaaagagacgtaaccggaattgctaatcttcttcaggaaatggttccagtgaaggaagtcattccgtgctttttgacagcatgcggccctaattacaaagaggttttttcagaacttgaaaaagatgacggcataacaacctttatcgttccatatttgctttttacgggtatgctgatgaatgaaatcgaacgagaggttcagaaattaaaagcccataatccgaacgtctacctctcttcctatatcggttttcatcctcatgtgaaaaacgcatttttgaaccgtgtgagagaaactgcggcaaattctgagggacaatttgattttgatggaggttcatatgcttccgctgcacattagcctggaaaagaagaaggttgtgattgcggggggcggaagcatcgctctcagaaggctgaaaacggtgatttctgagggagctgatataacgcttgtcagtccggatgtggaaccggaaatcaagcaaatggcagaagagcggcgtatcaaatgggaaaaacggacaattgaaaaagaagattatctcaatgctttcttcattattgctgcgacggataatgcggcagtgaacaaagaaattgcccaatccgcttcgccttttcagcttgtcaattgtgtcagtgacgctgagcttggcaatgtatatatgccgaaaatcgtaaaaagagggcatgtcactgtgtctgtttctacaagcggagccagtccaaagcacacgaaagagcttgctgaaaacgtggataagctgattgacggcgattttgttgctgaagtgaacaggctttatcagatgagaagaaagaaataagccagagcatacaaatgctctggcttttctttatgcggctcagctttttttgagcttgatgacagtatcagcatcaggcgtgacaaagacggtatgctggctgtcataagtgacgaaaccgggtttcgcgccgtttggttttttgacatgcctgatttttgtataatctacaggcactgaacttgaatctttagcttttgaaaaataagctgcaattgtcgcggcttccatgattgtttgctcatcaggttcgctgcttctgatcacaacgtgggagccgggaatgtccttcgtgtgaagccagatatcgtctctggccgccactcttgtcgttaaatattcattttgacgattgttcttacccactaaaattgtcagccctgaggtggattcatatgtttctaacaccggattgtgcggtttttgctttttctggcctttttgctgcttagggcgtaaatatttgccctcaacaagctcttccctgatttcgctgatatcccggggagaagcggacgaaagctgctgaatcagctgatcaaaatattcgatctcttcctgtgccagcctgatttgctcctcgacaactgcgaccgaatttttcgctttctgatacttcgtgaaataggcctgtgcgttttcagaaggcgttttgttcgggtttaaaggaatcgtgattgtcgggctttcttcatcataataattgatgacctcagcctgtttatcaccttttttcagcatatataaattagcggttaaaagctctccgtaaagctgaaattccttcgcgttttccgaatactccagggttttctctaattttttgattttgttggcattcttcttccgttcgttcacaacaaaacgctcaagatcctgagcctgttgcttaacccggtctcgttcagcttttccgaaataaaaacggtcgagcagttcgcttaatgaatcaaaacggcgcgcttcgccctttagatgagtcagctccagcagataaaaatattcctttccgtttacagtcgtaatgttgggaatgaaacggtgctctttcacttcggcaaacagtgccagcaacgcttttggcagtgtgactttgttggcaaggcctgctctgtgaaccgcttctttggcgaaaagcggagacacgcctgaaaagtggtcgacaatttgtttatcaagccttccttcttgaaagctgaggtgacgcaaaatatcatcttctgacgcctcaagaggcgatattttgtcctgagcaggcggaagcttataatcttggccgggcagtactgtacggtagctgttcattgacggtgataaatgcttaagtccgtcgataatcacattttctgctgcgtcagtcaaaatgatattgctgtggcggcccataatttctacataaagctttcgtacggtttcatcgccaatttcgtttcggcttttgatatgaaaaatcataatgcggtctaagcccgcttgttcaattttctcaatgaatccgccttcgatatgctttctcagcaacatgcaaaacattggcggttcgcttggattttcataagcttgtgccgtgatatgcacccgtgaatagctcggatgtgccgataataatagtttttggttttttcccttggcacggatgtggaaaatcacatcgtgcttatatggctgatggatttttgtaattcgtccgcccattattttctcgttaagttcgtgtgtcattccgtatgtaaacatgccatcaaacgacatatgcaatacaccctctcattcttcctgcattcgataattatagcatgaaatgggacgagtcagaataagcatgcttatagagtgatatctctataagagagcaggggagtggacgagcggaatgaagtttcatgaaatgggacaaacagatttactagaggcaaccaatacgtccatgaaacaaggattaacagaaaaagaggtaaaaaaacgccttgacaagcatggaccaaacgagctgcaagaagggaaaaaaacttcagcgcttctcttgtttttcgcgcagttcaaagattttatggtgcttgtgcttctggcggcaacgttaatctcaggatttcttggtgaatatgtagatgcggttgcgattattgcgattgtgtttgtgaatggcatactcggtttctttcaagaaaggcgtgctgagcaatctcttcaggctttaaaagagctttcaacaccgcacgtcatggcactcagggaaggaagctggacaaagattccttctaaggaactggtgccgggtgatattgtgaaatttacgagcggggacagaattggcgcagacgttcgaattgttgaagcgagaagccttgaaatagaagaatcagcgctaaccggggaatcaatcccggttgtgaagcatgctgataaattgaaaaaaccggatgtttcactcggcgatattaccaatatggcatttatgggtacgattgtgacccgcggcagcggtgtcggggttgtcgtcgggacaggaatgaatacggctatggggaaaattgccgacatgcttgaatcggcagggacattgtcaaccccgctgcaaagaagactggagcagctcgggaagattttgattgttgttgcattgcttctgaccgtacttgtcgttgctgtcggtgttattcagggtcatgatctgtacagtatgtttttagcaggtgtctcgttagcggtagccgctattccggaggggctgccggcgattgtgacagtggcgctttcgcttggtgtacagaggatgattaaacaaaaatccattgttagaaagcttcctgctgttgaaacgcttgggtgtgcgtctatcatttgctcagataaaacagggacaatgacccaaaacaaaatgacagtgacgcatgtctggtccggagggaaaacatggagagtggcaggggccggctatgaaccgaaaggaagcttcacactaaacgaaaaagagatcagtgtcaatgaacataagccgcttcagcagatgcttctgttcggagcgctttgtaacaactccaatattgagaaaagagacggcgaatatgtgcttgacggagatccgacagagggagcgctgctcaccgcggcaagaaaaggcggtttttcaaaggagtttgttgaatctaattacagagtgattgaagaatttccgtttgattccgcacggaaaatgatgactgtcatcgtagagaatcaagacagaaagcgctatatcattacaaaaggtgcgccggatgtactcatgcagcgatcttcccgtatttattatgatggctcagcggctcttttttcaaatgaaagaaaagcagaaacagaggcggtattaagacatttggcatcacaggcgctcagaacgatagcggtcgcctacaggccgataaaagcaggcgaaacaccgtcaatggagcaggcggaaaaagatctgaccatgcttggcctttcaggtatcattgatcccccgcggccggaagtcagacaggcgattaaagaatgccgtgaagcgggaattaagaccgtcatgattacaggtgatcatgtagaaaccgctaaagcgatagcgaaagacttgcgcctccttccgaaaagcggcaaaatcatggacggcaagatgctgaatgaactttctcaagaagagctttctcatgtggtggaggatgtgtatgtatttgcccgcgtttcccctgaacataaactaaaaatcgtaaaagcctatcaggagaacgggcatattgtggcgatgacgggagacggcgtcaatgatgctcctgccattaaacaggctgatatcggcgtctctatgggcattaccgggacagatgtggccaaagaagcatcatctcttgttctcgtggatgataattttgcgacgattaaatcagcgataaaagaaggcaggaacatctacgaaaatatcaggaagtttatcagatacctgttggcgtctaacgtcggagaaatccttgtcatgctgtttgcgatgctgcttgcccttcctttaccgctggttccgattcagattttgtgggtcaacttggtgacggacggattgccggcaatggcgctcggcatggatcagccggaaggagacgtcatgaagcgcaagccccgtcatccgaaagaaggggtatttgcccgcaagctaggatggaaggtcgtttccagaggatttttaatcggagttgccactattttagcgtttatcattgtgtaccaccgcaatccggaaaacttggcttatgcccagacgatcgcgtttgccacattggtgctcgctcagcttattcacgtgtttgactgccgcagcgaaacttctgttttctctagaaatccgtttcaaaacctgtatttaatcggcgcggtattgtcatccattttgctgatgcttgtagtaatctactatccgccgcttcagccgattttccatactgtagccatcacgccgggggactggatgctcgtcatcggtatgtccgccatccctacttttttgctggcggggtcacttttaacaagaaaaaaataaattcatatgatataatcttaggggtaatagcgtgtctattgcccttttattatgagaacagggaagaattgggtgttttaaaatgatacgaagtatgacaggcttcggcagtgcaagcaaaacacaagacgatctctctgtaagcgttgaacttaaatctgtgaactacagatttaaagaagtgaacgctcgtttgccaaggcctttgctatattttgaagataagctgaaacagaccattctgcagcatattcagcgcggaagaattgagcttttcgtatccgttgacagcgatatgcttgttgagaaaaggcttgaaattgattggccgctgctcgatgagtttgtcgcagccgcgagagatatgaagaagcggtatcaattgtctgcagagcccgatgtaatggatttctttaagcttgatcatgtcgtccaggttcatgaagaacagacgcaaaatgacaagctggaggcgttgatcatcgatgctgcagaagaagcggtaaaaggtctctgtgaaatgcgtgaaaaagaggggctgctcttagcgaaagactgcctgatgcatattgatcagcttgaagagctggtgagagaaactgaattgctggctgcagatgtcgtatctcgttaccgggaacggctgtatgccagaatcaaagaatggactgaagacgtattagacgagagccggcttgtaacagaatgcgctatttttgcagaccgctctgatatcactgaagagattacaaggctgaagagccacttcgcccagtttcgtgatatattagctagtggcggagctgtcgggcgcaaactcgactttcttgttcaggagctcaatcgggaagcaaatacgatcggctcaaaagcaaatgatcatcagatcacaaagcttgtcgttgaaatgaaaagttctattgaaaaaataaaagaacaagtgcaaaatatagaatagtgactgtgcgtattgtttacagacggtcttactaggctaaactagagacgtctattttacagggggaacgtagaagatgacgattaaactgattaatatcggatttggcaatatcatctccgccaatcggatgatttcgattgtcagcccggagtctgcgccaatcaaacggatgattcaggatgcaagagaccgcggaatgctaattgacgctacatacggacgaagaacccgtgcagttgtcgtcatggatagtgatcacattatcttatctgccgtccagcctgagacagttgcacacagactttctgttaaagaagaaattatggatgaagggcaggggtaattgccgcatgaaagaaagagggttattaatcgttctctcaggtccctcaggagttggtaaaggaacggttcgacaagcgatcttttcgcaggaagacacaaaatttgaatattcgatttcagtaaccacaagaagtccaagagagggcgaagtgaacggagtcgattattttttcaaaacaagagacgaattcgagcaaatgattgcggacaacaagctgcttgaatgggcagagtatgtcggcaattattacggcacgccagtcgattatgttgaacagacgcttcaagatggaaaagacgtctttttagaaattgaagttcaaggggctcttcaagtgagaaatgctttcccggaaggcctgtttattttccttgcgcctccaagcctttctgaactgaaaaacagaatcgtgacacgaggaacagaaacagacgctctgattgaaaatcgaatgaaagccgcaaaagctgagatcgaaatgatggatgcttatgactatgtcgttgaaaacgataatgtcgaaacggcttgcgataaaatcaaagcaatcgttcttgctgaacatttgaagcgtgaacgcgttgcaccaagatataagaaaatgctggaggttgaataatcaatgttagatccgtcaattgattctttaatgaataaattagattcaaaatatacgctggtgactgtttctgcgagacgtgcccgtgaaatgcaaatcaaaaaagaccaaatgattgaacatacgatttcacacaaatatgtaggcaaagctttagaagaaattgatgcaggcctgctttcgtttgaaaaggaagaccgcgaatagtagcacaagtagcaacctatatcatgtaggttgttatttttttccgtgcggttttgtaaagtgcagagggggagaattcattgcttaacaatcgaaatgtgttactttgcgtgagtggaggcatcgctgtttataaagcctgtgcgttaacgagcaagctggttcaggcaggagcaaatgtcaaagtgattatgactgaatccgcttgccgattcgtttcaccgctgacatttcaggcattgagccgccacgaagtctatacagatacatttaaagaacaaaatccaagcgtcatttctcatattgatgccgcagactgggccgacttgattatcgtagcgccggctacggctaatgtgattggaaaactggcaaacggcatcgctgatgatatgctgacgacaacattgttggcagcaacggctcccgtttggatcgcgccggcaatgaacgttcatatgtatgaccacccggcagtcaaacgaaacatttctgttctttatcaggacggttattgttttattgagccaagtgagggctatttagcatgcggttacgtaggaaaaggcagattggaagagccggaaaacatcgtaaagctggccgaaaaacattttgctgaagaaacatccgctcctttagaaggcaagcatgtggtcattacagccggcccaacgcgggaagcgattgatcctgtccggttttttaccaataaatcgacgggcaaaatgggctacgcactggcggaggctgctgttcagctcggcgcacgggtaatcttaatttctgggcctgtttcacttgatcagcctaaaggccttgctgagtttatccctgttcaatcggctgcggatatgcgcgaagctgtgctctctgtgtatgacgcaagcgatatagtcattaaaacagctgcggtagccgattttacgccgaaaacagtatttgaccataaaatgaaaaaacaagacggcggcatgaccttagaactgaaaagaacagtcgatattttgaaagaattgggcgagaaaaagaaagagcagattttggtcggatttgccgccgaaacacaagacattgaacactatgcacgtaaaaagctcgccgctaaaaaccttgatttgattgtggcaaatgatgtgaaagcaaatggggccggttttggtgctgatacgaatatcgtgacaatctttttcaaagacgggcataaacgcgaactcccgattatgtctaagctcgatgtttcttttgaaatccttcaggagatcgcagccctctcaaaacaaaccggagagcgctcatgaattttgcagaagtcatcgttgatgtcagcaccaaaaatatagacaggccttttgattataaaatcccagaccatctgaagggcatgatcaaaacggggatgcgggtcattgttccgtttggcccccgtaagattcaagggtttgtgacagcagtcaaagaagcatctgacctatcgggaaaatctgtcaaggaagtagaggatttattagatcttacacctgttctgacagaggagcttatgattctgtcatcatggctgtcagacaaaacgctgtcttttaaaataacggcgcttcaagcaatgctgcctgccgccttaaaggcgaaatatgaaaaagaattaaaaattgcacacggagccgatcttccgccgcaagtggaacggctgttttctgaaacaaagacgctgctgtattcagatatacccgatcatgagacgctgaaactgattcaaaggcatgttcaaaaaggggacattgacgtgacgtataaagtcgcgcaaaaaaccaataaaaaaatggtcaggcatattcaggcaaatgcgagtaaagaagagcttgctaagcaggctgagggattgtcccgccaagcagcaaaacagcaggcgattcttcactttctcatctctgagccggaaggtgtgaaaattcctgcggcggaattgtgcaaaaaaacggacacgagctctgcaaccatcaaaacccttatccaaaaagggcttttgaaggaaagctatgaagaggtttacagagatccctatcaggacaaaatgttcaaaaaaacagagcccctgccgctgacagacgaacagagggctgccttcgagcccatacgcgagacattggacagcgatgagcataaagtgttcctccttcacggcgtgacaggaagcggaaaaaccgaaatttatctgcaatcaattgaaaaagtactggcgaaaggaaaagaagccatcgtcctcgtaccggaaatatcgctgacgccgcaaatggtcaaccgcttcaagggccgcttcggctcccaggtggcagtcatgcacagcggtttatccacaggagaaaaatatgacgagtggcgtaaaatccaccggaaggaagtacggcttgtcgtcggtgccagatccgccatttttgctccgtttgaaaatctcggaatgataatcatcgatgaagagcacgagtcttcctataaacaggaagaaatgccgcgctatcatgcgaaagaggtggcaatcaagcgggctgagcatcacagctgcccggttgtattagggagtgctacgccgacattagaatcatatgctagagcgcaaaagggcgtatacgagcttctttcactgaagcaccgtgttaaccatcgggtgatgcccgaggtttcgcttgtcgatatgagagaggagcttagaaacggcaatcgctcgatgttttcagttgaattgatggaaaagcttgaagaaacgattgccaagggtgagcaggcggtgctgtttttaaataagaggggctactcttcctttgtgatgtgcagggattgcggctatgtcccgcaatgcccgcactgcgacatttccatgacgtatcatcgttacggccaaaggctgaaatgccattattgcggacatgaagagcctgttccgcacacttgtcctgaatgcgcaagcgagcatatccgctttttcggaacgggaacacagcgagtggaggaagagctgacaaaagtgctgccaagtgcgagagtgattcggatggatgttgacacgacatcacggaaaggcgcccatgaaaaattactgtcagctttcggagaaggaaaagcggatattcttctcggaacgcaaatgatcgcgaaagggcttgattttccgaatgtcacgcttgtcggagtgttaagtgctgatacaacacttcatattcctgatttcagatcggctgaaaaaacatttcagctgttaacgcaagtcagcggccgggcaggcaggcatgaaaagcccggccatgtcatcattcaaacgtatacaccgtctcattacagtatccagctgacgaaaacacacgattatgaaacgttctatcagcatgaaatggcgcacaggagagagcaatcctatccgccatactactatttggctcttgtgactgtttctcatgaggaagtggcgaaagcagcggttacagctgaaaaaatcgctcattttttgaaagcaaactgcggagctgacacgaaaattctcggaccaagcgcgtcgccgatagccaggatcaaagatagatatcgctatcaatgcgtgataaaatacaaacaggaaacccagttatccgctttattgaagaagatactggaacattataaacgcgaaattgaacaaaaacatgtaatgatttcaattgatatgaatccttatatgatgatgtaagatctcacgtcttggagggtaacaaattggcagtaaaaaaggtcgtcacacatcctgcggaggttttggaaacacctgcggaaaccgtgactgtttttgataaaaagctaaaaaaactgcttgatgatatgtacgacaccatgcttgaaatggatggtgtcggactggcagcgccgcaaatcggcattttaaaaagagcggccgtcgtagaaatcggggatgacagagggagaattgatctcgttaatcctgaaattttagaaaaaagcggcgagcaaaccggaattgaaggatgcttgagctttcctaacgtctatggtgatgtcacacgtgccgattatgtcaaagtgcgtgcgtttaaccgtcagggaaaaccgttcattctggaagcgcgaggctttttagcaagagccgtgcagcatgaaatggaccacttagacggtgtgctgtttacatctaaaataagtaaatactatacagaagatgaactagcggatatggaaggatgatttgatgacgagaatcgtatttatgggaacgccggatttttcagttcctgttttaagaaccctgatagaggacggatatgaagtagtgggggtcgtcacacagccggaccgtccgaagggcagaaaaaaagtactgacacctcctccggtaaaggaagaggcattgcgccacggcatcccggttcttcagccggaaaaagtcagattgacagaagaaattgaaaaagtgctggcattaaagcctgacctgattgtaacggcggcattcggacaaattttgcctaaagagcttctcgacagtccaaaatacggctgcattaacgttcacgcatcccttttgccggaactgcgcggcggtgctccgatccattattccattctgcagggaaagaagaaaaccgggattaccattatgtatatggtagaaaaattggatgcgggcgatatgatctcaaaagtggaagtggacattgaagaaaccgacaatgtcggaacactgcacgataaattaagcgttgctggcgcgaagctattgtctgaaacggttccaaacgttattgccggcagcatatcacctgaaaagcaggatgaagagaaagcgacgtacgcgcctaacattaaaagagagcaagagctgctcgactggtccagaacgggcgaagagctttacaaccagatccgcggcttaaatccatggcctgttgcttatacgactctaaacggacaaaacttgaaaatatgggcgtcgaaaaaaatagcggcaccaacaacagctgagcccggcacagtcgttgcagttgaaaaggaaggaattatcgttgccacaggtaacgagacggctctgttattaaccgaactccagccggcaggcaaaaaacgaatgaaaggcgaagactttgtgcgaggcgctcatgttgaagccggtgatgtgttaggagtaaacaatgaaaaaaactagtgttcgtgacatcgcccttgaggcgctgatcaaattagaacaaaaccaggcatacagcaacctgctgctgaaatcggtcattaaatcaaatgaactgagtgatcagaacagagggcttttgactgaacttgtctatggtacattacaaaataagatcgcgcttgattatatgcttaaaccgtttatcaataagcctcaaaaggtaaagccgtgggtgattcagcttcttcgcctatccttatatcaaatggagtatttggagaagattccagacagggcagccattcatgaagcggttgagattgctaaaatccgcggacacaaaggcattgcttcatttgtcaacggcgtgctccgttctattcagcgcgaaggtgttccatcctttgacgcgatcgaagatcctgtccgccggctggcgacagaaacaagccatccggaatggcttgtgaaagagtgggcggatgcgtatggatttgaagctgcggaaaagatttgccgcatccatctcattccgccgaaacagacgctgcgtgtcaatcaaatgaaagcagacagagctgagctgcttgaccaaatggctgctgagggaatcgaagttgaaaaaggcgacctcgctgaagatgctgtgaagctcttaaagggaacaattgccggaactcatttcttccaaaacggcgaagtttctatccaggatgagagctccatgctcgtcgcccgcgcccttgatcctaagtcagatgaaacagtgcttgacgcgtgtgcggcgcctggcggaaagtcggctcatatcgcagaattaatgaagaacaaggggagcgttacgtcgcttgatcttcacaaacataaagtgaagctgatcaaagaagcggcagatcggcttggcctgacaatcattcatgcggaaacaatggatgctagaaaagcgggggaaacgtttgaaaacgaacagtttgaccgaatattggtcgatgccccgtgctcaggtttcggtgttatcagaagaaagccggacatgaaatacacgaaaaaacctgacgacagcgcccgtctagctgaaatccagctgtcgatcttgagggaaatcgcaccattagtaaaaaaaggtggcactcttgtctacagtacgtgtacaatggaccggacagaaaatgatgaagtaatacatgcgtttatacaagaacatcctgattttgaacccgatttgtctcttgaaaagcggctgcctgaaaaggtgagaccctttgttcgggatggaaggcttcaaatccttcctcattatttcggaacagatggtttctttatttgcagcatgagaaagaagggataagcaatggcagaacttaataaaacaaaagtaagaaaagaattgcggacagagcgtccgtctatttattcttttgaattagatgaaatcaaacaatggctgacagacaatggagagaaaccgttccgtgcagcccagatctttgaatggctatatgaaaaacgcgtatcttcttttgaagatatgacaaacctctcaaaggatctgcgtgagaaattaaacactcgctttgtgttaacaacgctgaaaacggctgttaaacaaacctctcaagacggtacgatgaagtttttgtttgagcttcatgacggttataccatcgaaaccgttttaatgagacacgagtatggcaattctgtatgtgtaacgacacaagtcggctgccgtattggctgcacattctgcgcgtcaacgcttggaggcttaaaacgaaaccttgaagcaggggaaattgtcgctcaagtagtcaaagtgcaaaaagctcttgatgaaacggatgaacgcgtcagctctgtcgtgatcatgggaatcggcgaaccttttgataactttaacgaaatgctcgctttcttgaaaatcattaaccatgacaagggcctgaatatcggtgctcgccatattacggtctctacgagtggaatcatcccgaaaatttacgaatttgctgatcagcaaatgcagattaactttgcaatttctctgcacgcgccgaacacagaaatcagaagccgtttgatgccgattaacagagcatataaactgcctgatctaatggaagccgttaaatattatattaataaaacaggacgccgtatcagctttgaatacgggctgttcggaggcgtaaacgaccaggtggaacacgccgaagagcttgccgacttgctggaaggagtcaaatgccacgtgaacttgattccggtaaactacgtgcctgaacgggactatgtgcgcacaccgcgtgatcagatttttgcttttgaaaaaacgctgaaatcccgcggagtaaatgtcacaatccgaagagagcaaggacatgacattgacgcagcctgcggtcagcttcgcgcgaaggagcgtcaagacgagacgaggtgatgagggttgttaacagccttaaaaacagatacaggaaaaatccgccagcataatgaagatgatgcggggatattcaaggggaaagatgaatttatattagcggttgtcgctgatggcatgggcggccatcttgctggagatgttgcgagcaagatggctgtgaaagccatgggggagaaatggaatgaagcagagacgattccaactgcgccctcggaatgtgaaaaatggctcattgaacagattctatcggtaaacagcaaaatatacgatcacgctcaagcccacgaagaatgccaaggcatggggacgacgattgtatgtgcactttttacggggaaaacggtttctgttgcccatatcggagacagcagatgctatttgcttcaggacgatgatttcgttcaagtgacagaagaccattcgcttgtaaatgaactggttcgcactggagagatttccagagaagacgctgaacatcatccgcgaaaaaatgtgttgacgaaggcgcttggaacagaccagttagtcagtattgacacccgttcctttgatatagaacccggagacaaactgcttctatgttctgacggactgacaaataaagtggaaggcactgagttaaaagacatcctgcaaagcgattcagctcctcaggaaaaagtaaacctgcttgtggacaaagccaatcagaatggcggagaagacaacattacagcagttttgcttgagcttgctttacaagttgaagagggtgaagatcagtgctaatcggcaagcggatcagcgggcgttaccaaattctccgcgtcataggcggcgggggaatggccaacgtgtatttagctgaggatatcattctagaccgtgaagtcgcaattaaaatcctgcggtttgactatgcaaatgacaatgaatttatcagacgtttccgcagagaagcccaatccgcatcaagcctcgatcacccgaatattgtcagcatttatgatttgggcgaggaagatgatatttattatattgtcatggaatacgttgaaggcatgacgcttaaagaatacataacagcaaatgggccgcttcaccctaaagaagcgctgaacatcatggagcaaattgtctcagccatcgctcatgcccatcaaaaccagattgttcacagagacatcaagccgcataacattttgattgatcatatgggaaatatcaaagtaacggattttggaattgcgacggcactaagttcgaccacaatcacccataccaattcagttctgggctcggtccattacttatcacctgaacaggcccggggcggcttagccacaaaaaaatcggatatttatgcgcttggaatcgttctatttgagcttttaaccggccgtattccgtttgatggagagtcagcagtcagcatcgccttgaagcatcttcaagcggaaactccttcggcaaaaaggtggaatccatcggtcccccaaagcgttgaaaacatcatactcaaggcaactgccaaagatccttttcatcgctacgaaacggctgaagacatggaagcagacataaaaacagcttttgatgccgacagactcaatgaaaagagatttacgattcaagaagatgaagaaatgacaaaagcgatacctatcattaaagatgaagaacttgctaaagctgctggcgaaaaagaagctgaagtgacaaccgcacaagaaaacaaaacaaagaagaacggcaaaagaaaaaagtggccgtgggttttgctcacgatatgcctcgtttttatcacagctggaattcttgctgtcactgtttttccgtcgcttttcatgcctaaggatgtcaaaatacctgatgtctccggaatggaatacgaaaaagccgcagggctcttggaaaaagaaggtttacaggttgattccgaggtgttggaaatctcagatgaaaaaattgaagagggcctgatggtaaaaacggatcctaaagcggataccacagtcaaagaaggcgccacggtcaccctttataagagcaccggaaaagcaaaaacggagatcggtgatgtgacaggccaaacggtcgaccaagcaaaaaaagcgttgaaggaccaagggtttaatcatgtaacagtaaatgaagtgaatgacgagaaaaatgcgggcactgtcattgaccaaaatccttcagcagggactgagctggtcccgagtgaagatcaagtcaaacttacagtcagtatcggacccgaagacattacgcttagagacttgaaaacctacagtaaagaagcagcgtctggatatctggaagacaacggattgaagcttgtagaaaaagaagcatactcagatgatgttccagaaggacaggttgtcaaacaaaaaccagcagcaggtacggcagtaaagccgggaaacgaagttgaagtgacattctctctcggaccagagaaaaaacctgcgaaaacagtgaaagaaaaggtcaagatcccctacgaaccagaaaatgaaggggacgagcttcaagtgcaaatcgcggttgacgatgcggatcacagcatctctgacacttacgaagaatttaagataaaagagccgactgaacgaacgatcgaactaaagattgaaccaggccaaaaagggtactatcaagtaatggtaaacaataaagttgtcagctacaaaaccattgagtatccgaaagatgaataacaaggagggaaaatatgcctgagggcaaaattattaaggcgctaagcggcttttactatgtactggatgaatcagaggattcagataaagtaatacaatgcagaggaagaggcattttcagaaaaaacaaaattacccctcttgtcggtgattacgttgtgtatcaagctgaaaatgacaaagaaggatatctaatggaaattaaagaaagaaccaacgagcttatcaggccgccaatttgcaacgttgatcaagcggtccttgttttctcagcggttcagccttctttcagcacggcattgctcgaccgcttcctggttctcgttgaggccaatgatattcagccgattatatgcattactaaaatggatctgattgaagatcaagatacagaagatacgatacaagcctatgcagaagactatcggaatattggttatgacgtataccttacctcctctaaggaccaagatagtttagcggacatcatcccgcattttcaggataaaacaacggtatttgccggtcagtccggtgttgggaaatcctcgcttctcaacgcgatcagtccggagctcggattaagaacaaacgagatttccgagcatttgggccgcgggaaacacacaacccgccacgtggagctgattcacacgtccggaggtttggttgcagatacaccgggattcagctcgcttgaatttacagacattgaggaagaagagctgggctataccttccctgatatcagagaaaaaagctcttcatgcaaatttagaggctgtttacatctgaaagagccgaaatgtgcggtgaaacaagctgttgaagacggggaattaaagcagtatcgctatgaccattatgttgaatttatgacggagattaaagacagaaagccgaggtattagcataatgataaaggttgcaccatctattctttccgctgattttgccgctttaggcaatgagattaaagatgtagaaaaaggcggagccgattgtattcatattgatgttatggacggccattttgtcccgaatatcacaatcggtccgctgattgtagaagcggtccggccggtaacggatctgccgcttgatgtccatttaatgatagaagagccggatcgttatatcccggcttttgcgaaagcaggcgcagatatcctgtctgtgcatgctgaggcatgtccgcacctgcaccgtaccatccagctcattaaagagcaaggagtgaaggccggagtagttctaaacccgcatacccctgtacaagtcatcgaacatgttttcgacgatcttgatcttgttcttttaatgacggtgaacccgggcttcggcgggcagaaatttattcattcagtccttcctaaaataaaagaggttaagcgaatggcggatgaaaaaggaaaaaaagatctgttaattgaagtagacggcggcgtcaacaaagaaaccgctccgctcgtcattgaagcgggcgcaaatttactcgttgccggttcagctgtttatggccagtctgaccgcaaaaaagcaatttctgaaatcagaggaagtaaataagcagctttagaaaagagctgggcatacaatagcctaagctctttttcctgtatgcagagaaaggaatcagagatgaaaacaattaatatcgttgcgggaggcccgaaaaatctcattcccgatctaaccggctatacggatgaacacacgctttggatcggtgttgacaaaggcaccgtcactctcttagatgccgggatcattcctgttgaagccttcggagattttgacagcataacggagcaagaacgccggcgaatagaaaaagccgctcccgcccttcatgtgtatcaagcagaaaaagatcaaacagatttagacctcgcccttgattgggcgctggaaaagcagccggatattattcagattttcggcattacaggcggcagagctgatcattttttaggaaacattcagcttctgtataaaggtgtaaaaacgaacataaaaattaggctgatagacaaacaaaatcatattcaaatgttccctcctggtgaatatgatattgagaaggatgaaaataagcgatatatctccttcataccgttttccgaagacatacatgagctgaccctgaccggttttaaatatcctctaaataattgtcatattacgctcggttcaacactatgtattagtaacgaactcattcattcacgaggtactttttcgtttgcaaaaggcatattaataatgataagaagcacggattaagcatgtgctttcattcaattgctgaaaacaatgaacaaggcggttacgggacgttataggaggggacaaaaatgaaattttacaccattaaattgccgaagtttttaggaggaattgtccgggcgatgctgggctcatttagaaaagattaatgcccaggggttcaaagccctctttcaccacataaaaacgcctgccacatatcggggcaggcgttcattttgttatacacgctcaactttaccggatttcaaagctcgagcagatacatatacttttttaggttttccgttcacaaggatacgaaccttttgaagattcgcgccccaagtgcgcttagaagcgttcattgcgtgagaacggttattcccagctgttgtttttttacctgtgataacgcatttacgtgccatttgtttccctcctcacttgcacaaaacatctactttttaacattcatataatcttagatgctttcgatatggatactttaaataatttaccacagctaaaaaacgtttgcaactattgtttcatcatctttcaagaaaattcacttgacatcttgcggaaacagcagcgctatagtatatgtagaggtacggccagcgattattgcctggtcttttcataatggaaaccatatagtagaatagctgtaactctatgcattcgaaggaggaactagtgtgtccattgaattaagaacgaagtacggacagattgatatatctaatgaagtcatcgcgatggttgcaggaggcgcggcggttgactgttacggcattgtcggcatggcctctaaaaaccagattaaagacggactgactgaaatccttcggaaagagaatttcagcaggggtgtccaagttcgccaagaaggagaacagatacatatcgacatgtatatcattgtcagctacggcacgaaaatttctgaagtggcacataatgtccaaacaaaagtaaagtacacagtaaatcaaaccatcggactggcagtggattctgtcaatatttatgtccaaggcgtacgagtgacgaacccgtagttaggaggagtaggattgtctatcagaacattagacggcagaacctttgccgagatgattcttgcgggagcgcagaatctgtctcaaaacgccagtgcagttgatgcactgaacgtgttcccggtgccggacggtgatacgggaacaaatatgaacctgtcgatgacttccggagcaagagaagttgaacaaatggatacggatgatatcgggaaggtgggctccgcgttatctaaagggctgctcatgggagcacgcggaaattcaggagttatcctatcccaattgttccgcggatttagcaaaaacattgaaacgaaaaaagaaattaatgcacttgagtttgccgctgcgctgcaagcaggtgtagacatggcgtataaagctgtcatgaaacctgtagagggcaccattttaacagttgcaaaagacgctgcaaaaaaagcaatgatcttagcagaaaaagaaaccgatatcactgcgctgatgactgcagtgacagaagaagcagaggcgtctttaaaccgcacccctgaattgctacctgtcctaaaggaagtaggagttgtcgatagcgggggcaaaggcctgctctgtgtgtatgaaggtttccttgcttcattaaaaggtgaaactgtacctcagaaagcagttcttccgtcacttgacgacatggtcagcgcagagcatcacaagagcgcgcaaagcatgatgaataccgaagatattgaatttggattctgtaccgaagtgatggttaggcttgatcagacaaaaagagagttcgacgaaggcacgttcaggcaagacctcagccagttcggagattctctgcttgtgattgcggatgaatcgctggcgaaggttcatattcatgctgaagagccgggaaacgtgttaaactacgcccagcattacggtgaattgatcaaaataaaaatagaaaatatgagagaacagcatacctctatcatcagtcaagaaagcaaacctgcagacaacgaaacaccgccggcaaaacagccgtatggcattgtgactgtagcgatgggagaaggaattgcagacctatttaaaagcattggcgcttctgttgtgattgaaggcggccagaccatgaacccaagcactgaggatattgttgatgccgtgaagtctgtaaatgcagatacggtatttatcctgcctaacaactccaacattatcatggctgctaaccaagcggccagcgtagtggatgaacaggtttttgtcattcctgctaaaacggttccgcaagggatgtcagctctgctggcttttaacccggatcaagaagctgaagcgaacgaggccaatatgctaagcgccattcagcaagtaaaaagcggacaggtgacgttctcagtcagagatactcatattgacggtaaagacattaaaaaaggcgactttatgggcattctgaatggaacgattatcggcacttctgaaaatcagctgtcagccgcgaaaatgctgctgtcagaaatgatcggagaagatgatgaaatcgtgaccattctatatggtgaggatgcgtctcaggaagaagctgagcagcttgaagcgtttctcagtgaaaagtacgaggagattgaggttgagatccacaatgggaaacagcctctgtattcgtatatagtttcagcagaatagaagggcaatttgcccttctattcttatgtctgcttttaagtgcggcagcgctgtaacgcgcccgcttgccattttatatctgatcaattagtctagaagcaaagcgctaataagctctggttcataaggaggaatagcatgaaatacagaagcgtttttgatattatcggcccggttatgatcggtccgtccagctctcatacagcgggagctgctagaatcgggagagtggccagaagtttatttggcagagagcctgagcgcatcattgtatctttttacggctcgtttgcggaaacgtataagggccacggcacagatgtcgcgattatcggcggattgcttgattttgatacattcgatgaacggattaaaaccgctatacaaattgcagaagctaaaggaattgatatagagtttcgggtagaagacgcagtcccggtccacccgaacacagcaaaaatcaccatttctgatgaaaagggtgagctggaactgacgggtatttcgattggcggaggaaagattgaaatcacagaattgaatggttttgagctccggctgtcaggaaatcatccggccatattagttgttcataatgacaagtttggcacaattgccggtgttgccaatgttctggcgaaattttcaatcaacgtaggacatatggaagtagcccggaaagatatcggccagcttgcgctgatgacaatagaggtcgatcaaaatattgacgaccacattctcgacgagctgtcgaagctgccgaatattattcaagtgacaaagattgctgactagcgaaaagggtcaggaggagccagttatgtttcgtaatgtaaaagaattaattgagattactaaagaaaaacaaatattgatctctgatgtgatgatagctcaagagatggaagtaacagaaaaaacaaaagaggacatttttcagcagatggatcataacctgtctgttatggaagcggcggttcagaaaggactcgagggagttacgagccaaacgggcttaacaggcggagatgccgttaaattgcaggcctatattcgatcaggaaaaagcctgtctggcccgctgattttagatgctgtatcgaaagccgttgcaacaaatgaagtaaatgcagccatgggaaccatctgtgcgacaccgactgcaggttctgccggtgtggtgcccggtacgttatttgctgtaaaagaaaagctgaatccaacaagagaacaaatgatccgctttttgtttacagccggggctttcggatttgtcgtggccaataacgcaagcatttccggcgccgccggaggatgtcaggcagaggttggatcagcttcaggcatggcggctgcggctattgttgaaatggcaggaggaacacccgaacaaagcgcggaagccatggccattacattaaaaaatatgctaggcctcgtgtgcgaccctgttgcagggcttgttgaggtgccttgcgtgaaacggaatgcgatgggcgcgtcaaatgcgatgattgctgctgatatggcattggcgggcattacaagccgtattccatgtgatgaggttatcgatgccatgtataaaataggccaaacgatgccaactgcacttagagaaacaggccagggcggtttagcggcaacaccgacaggaagagaattagagaaaaaaattttcggaggagcgctaggttcacgtgaaacaacatcagcaaactagtatagctaacattaagggtattgggccggaaacagaaaaaacattgaatgaactcggtatttatgacatttctgatcttctgaattatttcccttatcgctatgatgactacgagctgagggatttagaagaagtaaagcatgatgaaagagtcacagtcgaagggaaggttcattcagagccttctcttacctattacggaaaaaaacgaaacaggctgacattcaggcttctggtcggccactatttaatcacagccgtatgttttaaccggccttatttgaagaagaagctttcgctcggctctgtggtgacggtttcaggtaaatgggacaagcaccgccaaaccatctctgttcaggagttgaaaaacgggccgcatcaagaagacaaaagcattgaaccagtgtattctgtgaaagaaaatgttaccgtcaaaatgatgaggcgctttattcagcaggcgctgacccaatatgcagactcacttcctgatcctcttccggaaaagctaagaaaaagctataaactgcctgactattatcaagcgttaaaagcaatgcaccagcctgaaacaagggaagcattaaagcttgccagacggcggtttgtttatgaagaatttttgttgtttcagttgaaaatgcaggcgttccgaaaggcggaaagagagcagacacaagggatacggcagcgtttttcaaacgaagaactcatgagatttatcaaaagcctcccgtttcccctcacaaacgcccagtcacgcgttcttcgcgaaataacagcagacatgtcttctccatacagaatgaaccgtcttcttcaaggggacgttggatcaggaaaaacggcagtcgccgccattgcactgtatgccgcgatcctatccggataccaaggagcgctcatggtgccgacagaaattctggccgagcagcatgctgattcgctcgtttcgctatttgaaaaatgggacgtcagcgttgctcttttgacaagctctgttaaaggaaagcggcgaaaagaactgcttgagcgtcttgcggcgggtgagattgatattcttgtaggaacccatgctttaatccaagacgaggtggagtttaaggcgttgagtctcgttattactgatgaacagcacagatttggagttgagcagcgcaaaaagcttcggaacaaagggcaggatcccgatgttctctttatgacagccactccaatcccaagaacattagcgatcacagtattcggtgaaatggatgtatctgtcattgatgagatgccggctggacgaaagcgaattgaaacctattgggtaaaacatgacatgcttgatcgtattttggcatttgtcgaaaaagaattaaagcaaggcaggcaggcttatatcatctgtccgctgattgaagaatcagataagcttgatgtgcaaaacgccattgacgtgtacaatatgctttctgatatttttcggggaaaatggaatgtcggccttatgcatggaaagctgcattccgatgaaaaagatcaggtcatgagagaattcagcgcaaatcactgtcaaattctcgtatcaaccactgttgtggaggttggcgtaaatgttccgaatgcaacaattatggtgatttatgacgccgaccgtttcggactatcacagcttcaccagctgcgcggccgtgttggacggggtgagcatcaatctttctgtattctgatggctgatccaaaatcagaaacagggaaagaacggatgaggatcatgtcggagaccaatgacggtttcgagctgtctgaaaaggatctggaactgagaggtcccggtgatttcttcgggaaaaaacaaagcggaatgccggaatttaaagtggcggacatggttcatgattacagagcgcttgaaacggcaaggcaggatgctgcgaatcttgtggcttctgacgcgttctggaaggagccggaatacgctgtgttaagagatgaattgctgaagagcggagtaatggacggggaaaaattaagctgagtatcagaagtttttggtgttcagccagaaacaatcgttgcattccaatctatgaaattatatactactattagtacctagtcttaattgtccggatggtgtttagatatgagaagaaataagagagaacgccaggaattacttcagcagacgattcaagcaaccccctttattacagatgaagaactagcgggtaaattcggggtgagcatccagacgatacgtttggaccgcttagagctttccatacctgaactgagagaaagaattaagaacgtggcagagaaaacacttgaggacgaagtgaagtccctgtcacttgatgaagttatcggagaaattattgaccttgagctggatgatcaggcgatatccattttagaaataaaacaggagcacgtgttcagccggaatcagattgcgagaggacaccatttatttgcacaggcgaattctttggccgttgcagtcattgatgacgagctggcgctgactgcaagtgcagacatccgctttacaagacaggtaaagcagggtgaacgtgtcgtagcaaaagcgaaagtgacggctgtcgaaaaagaaaaaggaagaacggttgtcgaagtgaacagctacgttggcgaagaaattgttttttctggacgctttgacatgtatcgttcaaaacattcataaaggtggagcatgcatgagaatagctgtagatgcaatgggaggagaccacgctcccaaagctgttattgacggagttataaaaggtatagaggcatttgatgatctccatatcacacttgtcggtgacaaaacaacgatagaatcacatttaacaactacatcagatcgcatcacggtgctgcacgcagatgaagtgattgagcctacggatgaaccggtccgtgccgtgcgaagaaaaaagaactcatctatggttcttatggcgcaggaggttgcggaaaacagagctgacgcctgcatttcagcgggaaataccggtgcattaatgacagccggtctctttattgtcgggagaattaaaggaattgaccgtccggcgcttgctccgacacttccgactgtttcgggagacggatttcttctccttgatgtcggcgccaatgtcgatgccaaaccggagcacctcgttcaatatgccatcatgggttctgtttattctcagcaagtgcgcggtgtcacttcaccgagagtcggacttttaaatgtcggaacagaagataaaaaaggaaacgaactgacgaagcagacgtttcaaattttaaaagaaacagcaaacatcaattttatcggaaacgtggaagcgcgagaccttttagatgatgtggcggatgttgtagtaacagacggctttaccgggaatgttacactcaaaacgctggaaggctctgcgttgtcaatttttaaaatgatgagagacgtaatgacgtctactttgacatccaagcttgcagcagctgtgctgaaaccaaaattgaaagaaatgaaaatgaaaatggagtattcgaattatggcggagcaagtctttttggcttaaaagcgcctgtgatcaaggcgcacggctcttcagattcaaatgctgtattccatgcgattcggcaagcaagagagatggtcagccaaaatgtggctgcgctcattcaggaagaagtgaaagaagaaaaaacagatgagtagtctggaggtttttacatcatgagtaagattgcatttttattcccgggtcagggatcacaatttatcggcatgggaaaagagctttatgagcaggtgcctgctgcaaagcgtctgtttgatgaagccgatgaaacgttggaaacaaaactcagctcgcttatttttgagggggatgctgaagaattaacacttacatacaatgcgcagcctgctttgcttacgacaagcatcgctgttcttgagaaatttaaagaatctggcattacacctgatttcacagcaggacacagccttggtgaatattctgcactggttgcggctggcgctctgtctttcaaagatgctgtttatactgtcagaaagcgcggagagtttatgaatgaagcggtgccggctggcgaaggagcaatggctgcgattctcggcatggatgctgaagcattaaagcaagtaaccgataaagtcacagaggaaggcaaccttgtacagcttgcgaatctcaactgtcctggccaaatcgtcatttccggaacagctaaaggggttgagcttgcatctgaactggcaaaagagaacggcgcaaaacgcgcaattccgcttgaagtaagcggtccgttccattctgaactgatgaaaccggctgctgaaaagctgaaagaggtattggacgcctgtgacataaaagacgctgacgttccggtcatctcaaatgtttctgctgacgtgatgactgaaaaagcagatatcaaagaaaaacttattgagcagctttactctccggttcgttttgaggaaagcattaacaagctgatcgcagagggtgttacgacttttattgaaatcggtcccggaaaagtgctttcaggccttgtgaaaaaagtgaatagacggttaaaaacaattgctgtatcagatccggaaacgatcgagctggcaattcaaacgcttaaggaggagaatgataatgcttaatgataaaacggctattgtcactggcgcatcccgcggaatcggccgctcaatcgcccttgatctggcaaaaagcggagcaaatgttgtcgtgaactactccggcaatgaagcgaaagcaaatgaagtggtagatgaaatcaaatcaatgggcagaaaagcaattgctgtaaaagcggatgtatcaaatcccgaagatgtacaaaacatgataaaagaaacattgtctgttttttctacgattgacattctggttaataatgcgggaattacaagagacaatctcatcatgagaatgaaagaagacgaatgggatgacgtcattaacattaacctgaagggtgttttcaactgcacaaaagctgttacaagacaaatgatgaaacagcgttcaggccgcattattaacgtatcgtctatcgtcggcgtcagcggaaaccctggacaagccaactacgtggctgcaaaagccggcgtcatcggtttaaccaaatcttctgctaaagagctcgccagccgaaatattacggtaaacgcaatagcgccaggatttatctcaactgatatgacagataaacttgcaaaagacgttcaagacgaaatgctgaaacaaattccgctcgcgcgctttggtgaacctagcgatgtcagcagtgttgtcacgttcctagcttcagagggagctcgttatatgacaggccaaacgcttcatattgacggcggaatggtgatgtaagttttttctcgaaaatttcatcgtagtttctctagttttttaaaaacgaatccactataatacttgaggggaggtgaattgctatggcagacacattagagcgtgtaacgaaaatcatcgtagatcgccttggcgttgatgaagcagacgtcaaacttgaagcttctttcaaggaagacttaggtgctgattccctagatgtagttgagcttgttatggaacttgaagacgagtttgatatggagatttctgacgaagatgctgaaaagattgcaacagtcggcgacgctgtgaactacatacaaaaccagcaataagctgatgctaaaagtcccgccgaaacgcggggctttagccctttattcgtgcagttattacagcatgccgcttttacgcgcgctgtatccggtttagtcagagaagcgcggtgaacctgatgtgcctatggaggttactatgtcaaaacactcacattataaagataaaaaaaagttctataaaaaagtagaacaatttaaagagtttcaagaacggatttcggttcactttcaaaatgaaaagcttttgtatcaagcatttacacattcatcttatgtgaatgagcatcggaaaaagccgtatgaagataatgaaaggcttgaatttttaggtgacgctgttttggaactgacgatctccagattcttatttgccaaatacccggctatgagtgaaggagatttgacgaaattgagagccgcaattgtttgcgaaccgtctctcgtttcattggctcacgagctgtcattcggcgatcttgtcctgttgggtaaaggcgaggaaatgacaggcggaagaaagcgtcctgctctattggcggatgtttttgaggcatttatcggagccttgtaccttgaccaaggattagagccggtcgaaagtttcttaaaagtttatgtgttccctaaaattaacgatggtgctttttctcatgtgatggatttcaaaagccagctgcaggaatacgtgcagcgggacggcaaaggctctctggagtataaaatctccaacgaaaaaggacctgcgcacaaccgtgaatttgaagccatcgtatctctaaaaggtgaaccactcggagtcggaaacggccgttcaaagaaagaagccgaacagcacgctgctcaggaagctttagctaaattgcaaaaacaccatacgaaacaataaaatcccccttatgactcagggggatttcagtatgtatgccgtcttatttgaccaatgtttatgatagaattgaaatacttattacataaggaggatcgctatgttcctcaaacgtttagacgttataggatttaaatcatttgcagaacggatttccgtagacttcgttaaaggcgtgacagcagttgtcgggccgaacggaagcggaaaaagcaacatcacggatgccattcgctgggttctcggcgaacaatcggcacgctctcttcgcggcggaaaaatggaagacatcatttttgctgggagtgattcaagaaagcgattaaatctagctgaagttacgcttactcttgataatgatgatcatttcttgccaattgacttccacgaggtgagtgtcacaagacgtgtgtacagatcaggtgagagtgagtttctgattaacaatcagccatgccgcttgaaagatattattgatttatttatggactctgggcttggtaaagaagcattttctattatcagccaagggaaagtggaagagatcctgagcagcaaagcggaggatcgccgcagtatctttgaagaagcggccggggtgcttaaatataaaacgagaaagaaaaaagcagaaaataaactgtttgagacacaggacaatctaaatcgggtagaagatatattacatgagcttgaaggacaggttgaacctcttaaaattcaagcttcaatagcgaaagactaccttgagaaaaagaaagagctggagcatgttgaaattgcgctgactgcctatgatatcgaagagctgcatggtaaatggtcgactcttaaagagaaagtgcagatggcaaaagaagaagagcttgctgaatcgtctgctatttctgcgaaagaagcaaagattgaggatacaagggacaaaatacaagcgcttgatgagtcagtagatgagctccagcaagttttactggtaactagtgaagagctggaaaagcttgaaggccgtaaagaagtcctgaaagaacgaaagaaaaacgctgtgcaaaaccaagaacagcttgaagaagccatcgttcagttccagcaaaaagaaacggttctgaaagaagagctttcgaagcaggaagctgtcttcgaaacgcttcaggctgaggtgaagcagttaagggcgcaagtaaaagaaaaacagcaggctctcagtcttcacaatgaaaatgtcgaagagaaaatcgagcagctgaaaagtgattattttgagctgttaaacagccaggcttcgatacgcaacgaactccagcttcttgatgaccagatgtcccaatccgctgtcacattgcagagacttgcggacaacaatgaaaagcacctgcaggaacggcatgatatttctgcgcgtaaagccgcatgtgaaacggaatttgcccgaattgagcaggagattcacagtcaagtcggtgcatatcgtgatatgcagacaaaatatgagcagaaaaagcgccaatacgaaaaaaatgaatccgctctgtatcaggcataccaatacgttcagcaagcgagatcaaaaaaggacatgcttgagacgatgcagggagatttctccggcttttatcaaggtgttaaagaagtgctgaaagcgaaagagcgccttggcggaattcgcggagcggttcttgagctgatttctacagaacagaagtatgaaacggccattgaaatagcgctcggcgcttctgctcaacacgtcgtgaccgacgatgaacaatctgcccgcaaagcgattcaatatttaaagcagaattccttcggccgggcgacgtttctgcctctttctgttattagagaccgccagcttcaaagccgtgacgcggaaacagccgcccggcattcatcatttctcggggttgccagtgaacttgtcacatttgatcctgcgtatcgaagcgtcatccagaatcttcttggaaccgttctgatcacagaggacttaaagggtgcaaacgagcttgcgaagcttctcgggcaccggtaccgcatcgtaacccttgagggagatgttgtgaaccccggtggttcaatgacgggcggcgcggttaaaaagaaaaataactccctccttggaagaagccgggagctagaagatgtgacgaaacggctcgctgaaatggaagagaaaacggcactgcttgaacaagaggtcaaaacccttaagcactccattcaggatatggagaaaaaactggctgacttaagagaaaccggggaaggcttaaggttaaagcagcaggatgtgaaaggccagctgtacgaacttcaagttgccgagaaaaatatcaatacccatttagagctctatgatcaagaaaaatctgctctgtcagaaagcgatgaagagagaaaagtgcgcaaacgcaagcttgaagaagagctctctgccgtatctgaaaagatgaaacagcttgaagaggacatagacagactgacaaaacaaaaacaaacgcaatcctcaacgaaagagtctctctccaacgagctgactgagctgaagatcgcagcggccaaaaaagagcaggcttgcaagggggaagaggacaaccttgccagattaaagaaagagctcactgaaacagagcttgcgttaaaagaagcaaaagaagacttaagcttcttaacgtcagagatgtcatctagcaccagcggcgaagaaaagctggaagaagcagcaaaacataaattgaatgacaaaacgaaaacgatcgaactgattgcattaaggcgcgatcagcgcatcaagcttcagcatgggcttgatacgtatgagcgtgagctgaaagaaatgaaacgcctgtataaacaaaaaacaacgctcttaaaagacgaagaagtcaaacttggacgaatggaagtcgagcttgataatttactccaatacttacgggaggaatacagcttgtcctttgagggggcaaaagagaaatatcagcttgaaactgatccagaggaagccagaaagcgcgtgaagctgattaaactcgcaattgaagagctgggtaccgtgaacctcggaagcatagatgagtttgagagggtcaacgaacggtacaagtttctgtcggaacaaaaagaagatttaacagaagcgaaaaataccttgttccaagtgattgaagaaatggatgaagaaatgacgaagcgctttaacgacacattcgtccaaatccgctcacactttgatcaagttttccgctccttattcggaggagggcgagctgaactgaggctcaccgatcctaacgatctgcttcattcaggagtcgagattatcgctcagccgccggggaaaaagctgcaaaacttaaacctcctgtcaggcggagagcgtgcgcttactgctatagcgctcttattctcaatcctaaaggttcgtccagtgccgttttgcgtccttgacgaagtagaggctgcgctcgacgaagcgaatgtgttccgatttgcgcagtatttaaaaaaatacagcagcgatactcagtttattgtgattacccacagaaaaggaacgatggaggaagcggatgtgctttatggcgtaaccatgcaggaatccggtgtttccaaggtaatttcagttaagctggaagaaacaaaagaattcgttcagtaacgaggaaagaggttaaaagatgagcttttttaaaaaattaaaagagaaaatcacaaaacagacagattccgtatctgaaaagtttaaggatggccttgaaaaaacaagaaactcctttcaaaacaaagtgaatgatcttgtatcccgttaccgtaaagtggatgaggatttcttcgaagagcttgaagaggttcttatcagcgcggatgtcggttttacaaccgttatggaattaatagatgagctgaaaaaagaagtcaaacgcagaaatattcaagatccaaaggaagtccagtcagtgatttctgagaaactggtcgagatttataacagcggagatgagcaaatttcagaactgaacatccaggatgggcgtttaaacgtaatccttctggtaggtgtaaacggcgtcgggaaaacaacaacgatcggaaagcttgctcataaaatgaaacaagaaggaaaatctgttgtacttgccgccggagacacttttagagcgggagccattgaacagctggaagtatggggagagcgtacaggagtgcctgtcattaagcagacggcaggaagcgatccggcggctgtcatctacgatgctgttcatgctgcgaaagcaagaaatgccgatgtattaatttgtgatacggcagggcgtctccaaaacaaagtaaatctcatgaaagagcttgaaaaagtaaaacgtgttatcgaaagagaagttcctgaagctccgcatgaggtgctgcttgcccttgatgccacgaccggccaaaatgcaatggctcaggcaaaagaattctctaaagcaacaaatgttaccggcattgctttaacgaagcttgacggtacggcaaaaggcggtatcgtccttgcgattcgcaacgagcttcacatcccggttaaactagtcggtttaggagaaaaagttgatgaccttcaggaatttgatccagaatcctatgtgtacggactcttttcagatttagtggaaaaagccgacgattaagaaaaaggccccaacatcttggggcctttttcttttttatcttcttacttgataggcgaaatgataaaggctgttatcagtggataccagtcttgactcaccagaaaaaactctgaatgggatgatgtcatagtaatgaacggaaacagatgtgtaatacgtatagtaaccagcagctggccccaaatacattggaacctcaaatgttccgtttgcatcagtcgttcctgaagcagtttgtgttgtgtttccgaccttcgtgtccgcttcaaatcttacgggcgcgtttggcactggctgtccgttttggtcgagtaatttgccgcttactgtaatattgtacttgactcgccaatattgaccttgtccgtaattgattttaccgtatacccctccatctgtgctgatatttgtgattgaggccttataaggtgcctcagcagcgtctgcttgctgtgccgggaaacctattgtaaacagggctgccagacataacataaacaataaaccgatttttttcataaaaatcctccttaaaatagggttcatatacaatatcggaataaattggatgatatttagcgtattttggaaaagttaatcgccgctttgacaagataaaaacttgacagtgtcattaaaaccgtgtaaactaagttatcgtaaagggatttgacttaacaaaggggagagctcaaatgtcactcgaaaagacaacgagaatgaattatctgtttgatttttatcagtcgttgttgacgtcaaaacagaagagctatatgtcgctttattatttggacgatttctccctaggcgaaatagccgaagaatatgaggtttcaagacaagctgtttatgataacatcaaacgaacagaagcaatgcttgaacaatatgaagaaaagctgctccttttgaaaaagtttcaggagcgtaaagagatgtttaataagctgaaggagcttgcttccggttcaaaagaagaggaagaaattacagctctgattgaagcgcttgagaaattagattaggaggcggcaaactatggcatttgaaggattagccgaccgactgcagcagacgatttctaaaatccgcggaaaagggaaagtcagcgaacaagatgtaaaagagatgatgcgtgaggtccgtcttgcgctgcttgaggctgacgttaactttaaagtagtcaaggattttgtcaaaaaagtaagtgaacgcgctgtaggccaagacgtcatgaaaagtctgacgcccggccagcaggtcattaaagttgttcaagaggaactgactgagctgatgggcggcgaagagagcaaaatcgccgtcgcaaaaaggccgccgactgttattatgatggtcggtctccaaggtgccggtaaaacgacaacaagcggtaagcttgcgaatctgctgcgcaaaaagcataatcgcaaaccgatgctggttgctgccgatatttaccgcccagccgcaattaagcagctggaaacactcggcaaacagcttgatatgcctgttttctctcttggcgatcaggtcagtcctgtagaaatagctaaacaggctattgagaaagccaaggaagaacattatgactacgtcattttggatacggcagggcgcttgcatatcgaccatgaactgatggatgaactgaccaacgtcaaagaaatcgcgaatccggaagaaattttcctggttgtcgattcaatgaccggtcaggacgctgtgaatgttgccaaaagctttaatgaacagctcggtttaaccggtgttgtgttgactaagctggatggagacacacgcggcggggctgcgctttctattcgcgctgtcacaaacacgccaattaagtttgcaggtttgggcgaaaagcttgatgcgttagagccgttccatcctgaacgcatggcatcaaggattctcggcatgggcgacgtgctgacattgattgaaaaagcacaggccagcgttgatgaagacaaagccaaagagctggaacaaaaaatgagaacgatgagcttcacattggacgattttctggagcagctcgggcaagtcagaaacatggggccgcttgatgagcttctgcaaatgatgccgggtgcaggtaaaatgaagggcctgaaaaacatccaagttgatgaaaaacagctgaatcatgtggaagcaatcatcaaatcaatgactgttcttgaaaaagaacagccggatattatcaatgccagccggcggaagcggattgcaaaaggaagcgggacatccgtacaggaagtcaaccgtctgcttaagcagtttgatgaaatgaaaaaaatgatgaagcagatgacaaacatgtcaaaaggcaagaaaaaagggtttaagctaccttttatgtaatcggttatacatgataaaaccgttgttaagaaaaaacactttacaaacacttttatcattgttaatatactatcttgttgaaatattttcggaggtgctagtaaaatggcagtaaaaattcgtttaaaacgtatgggagcaaaaaaatctcctttctatcgtattgttgtagcagattctcgttcaccacgtgacggccgtttcatcgaaacagtcggaacttacaacccggttgcaaaaccagcggaagtaaaaattgacgaagagcttgctcttaaatggcttcaaactggagcgaaaccatctgatacagttcgcaacttgttctctagccaaggaatcatggaaaaattccacaacgctaaacaaggcaagtaatgactgatcaacacttggaagatttgattgtccacattgtgacgccgcttgttgatcatccagatgacattcgcgtcataagagaagaaaccgatcaaaagattgcgctgcgcttatctgtccataagtcagataccggtaaagttatcggaaagcaaggccggactgcaaaagcgattcgaacagctgtatttgcagctggcgtacagtcttctaagaaagttcaatttgaaatatttgactaaaagggagagggccggcacctcccctttttttacacgcaaaaaaagggtaaactgatagaagcttaggcaaaatagaaaagcctggacgagtaaaagttttaaaagcggggagcttggtgcgatgcaaattattcaccgtgtagccgttatgcaagtcttaaccgagcgcagtaaagaaaagcttttagcttcttttgctgagaagaaacaaatgcttgaacgagaatgcagccagctctattttcagcttagaaaacatgagaaagaacagcaaaaccctaatatgattgaacaatttaaaaaggcaatagaaaagcgaaaagatgatataaaaatcattgattttcaaattgctcaagtacatacattgccgcttggcagtgagttgaaagaaaaggaagtcgatgcgctgctgacgattgaagccggggatgactggcatgagaaaacagcagcgaacaccatcgtcataaaagacggaaaagtaattgaaattcgccagaggtgatcatatgacaaagcgatggtttaatgtaggcaaaatcgtaaatacccacggaatcaaaggcgaagtgcgggtgatttcaaaaacagattttgccgaagaacgatacaagccgggaaacacgctgtatttgtttatggacggccgtaacgaaccagtggaggtaacggtaaacacacatagactgcataagcaatttcatctcctgcagtttaaagaaagacaaaacctaaatgaagtagaagagctgaaaaacgcaatcattaaagttcctgaagaagaattaggagagctgaatgagggtgaattttatttccacgaaattattgggtgtgaagtatttactgaagaaggcgaactcatcggaaaggtcaaagaaattttgacgcctggagccaatgacgtttgggtcatcggacgaaaaggaaaaaaagacgcactcattccttacattgaatcagtggttaaacatatcgatgtcagggaaaagaaaattgagattgaactcatggaagggttaatagacgaatgaaaatcgattttttgacgctgtttcccgaaatgtttgaaggcgtgctcggctcatcgattcttcaaaaagcccaggaaaaagatgcggtgcagtttcaagtcgtaaatttccgagagtactctgataacaagcacaatactgttgatgattatccttatggcggcggggcaggcatggttctcaagccccagcctgtttttgacgcggtcgaggacctgacatcaaaggcagccgctgctccgcgtattatcctcgtatgcccgcaaggtgagcgttttacccaaaaaaaagccgaacaattagctaaggaagagcatttgctgttcatttgcggccactatgaaggctatgatgaacgcattcgcgagcacttggtaacggatgaaatatcaattggcgactttgttctgacgggcggtgagctccctgcaatgatgatcgcagacagtgtggtcagactgcttccgggtgtactgggtaaagaggcttcccatattgaggattccttcagcaccggacttttagagcacccgcattatacaagaccggcagattacaaaggtttaaaagtgcctgaaacactcttgtcaggaaaccatgcaaaaattgaagaatggcggaataaagaatcgatcagaaggacctacctaagacgtccggatctgttgaaagactacccgcttacagagcagcaaagaaagtggatttctgaatgggaaaaagaatagattttattgcataggctatgaaattgtgataagatactacttgtggcttaagcgggcttatccgctgcaagcttgaaaacgatgttccgctgtgccggtttttgtggccaagagcatctgttggaaggagttgaaaacgatgcaaaaactaattgaagatatcacaaaagaacagcttcgtactgatcttcctgcgttccgtcctggtgacactttacgtgtacacgttaaagttgttgagggtaaccgtgagcgtatccagatctttgaaggtgttgtgattaagcgtcgtggtggtggaatcagcgaaacgttcacagttcgtaagatttcttacggtgttggcgttgaacgtactttcccagtacacacaccaaaaatcgcgaaaatcgaagttgtacgttacggtaaagtacgccgtgctaaactttactacctgcgtgaacttcgcggaaaagcggctcgtattaaagagatcagacgataatgataacgaacgaaaagagcttgttacctgtaacaagctctttttttatacagaatttgaaaatgccggacaggcatcgtaaaatacataaaggacaacaatgaatcatgcatactgaagataaaggcggtgttcgtgtcacatgacaattcaatggttcccgggccatatggcaaaagcaagaagggaagtaaccgaaaaattaaaattaatcgatatcgtatatgaattggtagatgccagaattccaatgtcatcaagaaacccaatgattgaagatattctaaaaaacaagccgcgaattatgctgttaaacaaggctgacaaagcagatgcggcagttacacagcagtggaaagagcactttgagaaccaggggatccgctctctgtctattaattctgtaaatggacaagggttaaatcaaattgtgcctgcatcaaaagagatcctccaagaaaaatttgaccggatgcgtgcgaaaggtgtgaagccgagagcgattcgcgctttgattatcggcattccaaacgtcggaaaatcaacgctcatcaaccggcttgcaaagaaaaacatagcaaaaacgggagacagacctggtattacgacttctcaacagtgggtcaaagttgggaaagaattagagctattagatacaccgggaattttgtggcctaaatttgaggatgagcttgtcggtttgagactggcagtcaccggggctattaaagactcgattatcaatttgcaggacgtggccgtgtttggtcttcgttttctcgaagaacattacccagaacggcttaaagagcgttatggccttgatgagatcccagaggacattgccgagctgtttgatgcaataggtgaaaagcggggctgtctcatgagcggtgggctcatcaactacgataagacgactgaagtcatcattcgcgatattcgcactgaaaagttcggcaggctgtcatttgaacagccgacgatgtaaaggcgcgcagaaatgcgggtctttattttttcttggctgaaccgatacatacagtaagggagaagagaaagtgaatacattaaccgtaaaggacattaaagaccgtttgcaggaagtgaaggatgcacaagacccatttattgcccaatgcgaaaacgacccgagaaaaagcgttcaaacgcttgtagagcaatggcttaaaaagcaagcgaaagaaaaagcgctgaaagaacaatgggtgaatatgacttcctatgaaaggctggcaagaaacaaaggatttcgcttgattgcaggtgttgacgaggtcggccgggggccattggcaggaccagttgtcgccagcgcagtcatccttccagaggaatgtgaaatacttgggctgacagactccaaaaagctttcagagaaaaaacgcgaggaatattacgagcttattatgaaggaagcactggcggtcgggataggaattgtagaagctactgtgattgatgagatcaatatatatgaagcttcaaaaatggcaatggtgaaagcgatacaggatttgtcggatacacctgattatttgcttgttgacgcaatgacacttccgctcgacacggctcaggcgtcaattataaaaggcgatgccaaaagcgtgtctattgcggcaggtgcgtgtatcgcaaaagtgacgagggaccgaatgatgagcgcttatgccgaaacgtatcccatgtacggctttgaaaaaaataaaggctatgggacaaaagaacatttggaagctctcgctgcatacggcccaactgaattgcaccgcaaaactttcgctcctgttcaatctttcagataaatcaccatggacaaggaggcacctttttaaaatgaacatacgaaatgatgtgcaaaaggcgctgcagcaccttttcgggcgtacagccgtcccgcaggaaacatcaaaagtaaacgaagcgctaaacggggagaagcgtctcctcttaggaaaagtgcttcgtttactaggagatcagcatgccctgatccaagtcggcaatcaaactgttcagggaaaacttgaaactcagcttcgtcctcaggcatactattggttttcctacgaaaaaaaaacggcagagcaaacaggccgtcttcaggtcgttcaaagctttgatcaaaatcctaaaaccattcaggatgcagctggcaaacttttaaatgctatttcagtgaagacgtcaaacgcagctctcatgatgacaggagcgatgctgaaaagcaaaacacccgtaacagaaaatgatatcaaaacagctgtccgctggatggacacgctgccttcgcaagacacaaaaaaagcagttgaaacggttctcttcgctttaaagcgtgatcttcccattcactccgagattttgaatggtgttcacgctgtgaaatcgcctgttccgttgcatcagcacgtatcccagctgctacaggcaatcgaccaaaaccctcagcagagccaaatgatgtcaaagctaaaggaagcagtcacggtgcttttaaatagtgaaatcgatgtccatgcagaacggctgattgataagcttatttctttaaccgacaatacgaaagcaccttctccgacgaatacagctggaagcagggagcttagcacaccagctggctcccccggaaaagccagcctgccgattgcaaatcacacagcagaacagggaagcatacaagaagagcctgttaaaacagcagcagacattccaattaaagaagcccgccagctgctggtgaagctgacggaatctgctgaaaaaaacagtctccaaattgtgaaagaagcagcaaattggattaaagcggctgcttcatcgggtgatagtaagtcacttgcagcttcagctgttttacaggcggcacaagtcacagatcaggaagccgaagtctttttaaaggctgttcagcagacagcaccccatttggcggataaggcagatgttctttctttcttatccaaagtgaaaacggcaatcggcgcaagggacgaggttgcgttcattaaagcgtttgaacaaggaagcgcagtcacatctggcgaaatgcaatccatcaagctggctctttctgccttaagagcatcgcatgaggtagccgaaccagtcaaacaagaagccgatcagctttttcataaattaaatggccagcttttcatgcagcaggaccatccatcatacagccaaattgtaatgtcatttccgatgttttcgaagtcaggggttcaggacatgactgttctgtttaaaggaaagaaagaagcggatggaaagcttgatccttcccattgccgccttttgtttttgctgcagcttgatacactaaaagaaaccgtcgttgattgcttggtacagcaaaaagtcatgaccattacaatagagactgatttcgagctgcaggctgcgatcgatccgatggtgcccgcgcttaaacaggggctaaaggaaatggggtacagcctttcaggggtaaacgctaaaaaaagggttcacaccgaagaaaaggcttcaatcgatcaatatataacaagtatcagtgatcaggaagtggatgtgaaaatatgaaagagcagacaccgatcagaaaagctgttgctctccattatgacgaacaaaaagacaaggcgccgagagtgattgccacagggaagggccatgtagctgacaacattataaaagaagcgaaaaaagcaggggtcccgattcaagaagatcggacccttgtcgaattaatgcgccatttgacggtagatgatcaaattcctgaagctctttatgaaacggtagccgagattttttcattcatttacaaattggacgaaagcgtaaaaaacaaaaaatagctaaaatattccccatccttctttgaaatttatgtttttaataaagtaaaagtttgaatgtttagaaggattaaaagattttgcatcgaactgtagacaattcttccagtattattatagaatgaaagcgcagtctattttagttttgttacataagttaggaggatgggaaatgaatatccatgagtaccagggaaaagaagtcctcagaaaatatggggtatctgttcctgaaggtaaagtggcttttacagcagaagaagcagttgagagtgcaaagagcttatccagctcggtttatgtcgtaaaggctcaaattcatgctggcggtcgaggcaaagctggtggggtaaaaatagcaaaatcattagacgaagtaaaagcgtatgccgaagaactattagggaagaccctagttacacatcagacgggtccggacggccaagtaataaaacgcttacttattgaagaaggctgcgatattaaaaaagaatattacatcggtctagtgcttgaccgcgccacttcaagaatcgttttaatggcttctgaagaaggcggaacggaaattgaagaggttgcggagaaaacaccagaaaaaatcaaaaaagctgtcattgatccagctgttggccttcaaggctatcaagccagagaaattgcattcgctattaatattccaaaagagctcgtgggaaaagctgctaaatttatgcttggactatataaagcgtttgttgagaaagactgctcaatcgccgaaatcaatccgcttgttgtgactggcgacggaaatgtgatggcgcttgatgcaaaattgaattttgacagcaatgcgttgtaccgacaaaaggacattatggaatacagagatttggatgaagaagatccgaaagaaattgaagcgtccaaatatgatctaagctacatttcccttgatggaaatatcggctgtatggtaaacggcgcgggacttgcaatgtctacgatggatattatcaagcattatggaggagaaccggccaacttccttgatgtgggcggcggtgcaaccgcggaaaaagtcacggaagcatttaaaatcattctttctgatcaaaacgttaaagggatttttgtcaacattttcggcggcattatgaaatgtgatgtcatcgcagaaggggttgttgaagcgactagacaagttggtttgacattgccgcttgtcgtccgtcttgaaggcacaaacgtggatctagggaagaaaatccttagtgaatcaggattaaacattacatctgcggaatcaatggctgacggcgcgcagaaaatcgtatccttagtttaagaaagaatgaaaggcaggggaccaaataatgagtgttttcattaataaagatacaagagttattgtgcaagggattacaggttctaccgctttatttcatacgaagcagatgcttgaatacggcacaaatatcgttggcggtgtaacacctggaaaaggcggaacagaagcggaaggtgttcctgtatttaatacagtggctgaagcagttcaaacaaccggcgctaacgcgtctgttatatatgtgcccgcaccgtttgcagctgatgcgattatggaagcggtagatgcggagcttgatctcgtgatttgtatcacagaacatatcccggttttggatatggtgaaggtcaaacgcttcatggaaggcaagaaaacgagactgatagggccgaactgtcctggtgtcattacgcctgaagaatgtaaaatcggcattatgcccggatacatccataaaaagggtcatgtaggcgttgtatcacgttcaggaacattaacatacgaagcggtgcaccagctctcagaagcgggtgtagggcaatctacagctgttggaatcggcggcgaccctgtaaatggaacaaactttattgacgttttaaaagcgtttaacgaagatcctgacacacacgcagtcatcatgattggcgaaatcggcggtacggccgaagaggaagcggcagagtgggtaaaagccaacatgacaaaaccggtagtcggttttattggcggtaaaacagcacctcctgggaagcgcatggggcatgcaggcgccattatttccggcgggaaagggacagctgatgaaaaaatcaaaacccttaatgcatgcggaatcgaagttgcagagacaccttctgtcatgggtgaaaccttaatcaaggtgctgaaagagaagaacttgttcgaaacttgtaaaacgcattaataaaaaagggacagccgtcaaggctgttcctgctttttctaacaaaaggaggtcaatctattggatcaggccgctgtctgcctaacgatttgcagaatcaatcaattattatccccatcccttctattaaaatggtggaaagccgatccgtctatgtcgctgacatcacccgtgttacaaacggttactcgtgatcaaataaaagcagctgcattaaaaaacgaaatagaacaattttatccaaagctcccgcgtgtacttgctgcttatcgtgagcaaggcattaacaccatccctatttcttcaaagcaatatcctttctggcttaaaagcatttatgatccccctgccgtactgtttgcaaaaggtgatatgactcttctttcgaaagggagaaaaattggaattgtaggcacaagaaatccaacagcttatgggaaacaagttgtcaatcatcttacaaaagagatctgtcgtaaaggttgggtgattgtcagcggactggcgtctgggatagacggaatgtcccatgctgcaagtattaaggcgaaggggcggacaattggcgtcattgcaggcggatttcaacacatttatccccgagaaaaccttcagttagcagatcacatggctaaacaccatatcctgctgtcagagcacccacctgaaactaaaccccaaaaatggcatttccctatgagaaaccgtattatcagcggactaagtgaaggcgttattgtcgttcagggcaaagaaaaaagcggttcgctgattactgcctatcaagcattggaacaagggagagaggtatttgccgtacccggttcattgtttgacccttacgccggaggtcctataaaactgatccagcagggggctaaagccatatggtcagcagaggatattttcgaggaacttcctgagagaaacgttcaatatacggaacccttttgaattatcgtttgacaaacggtattgtaatatttaataatagtgaggatttaaagttgcatattgttttctatttaattaatgacgttcatgataaagaatgaaatgttgaaagccaaataaagacagctgcaaaaataaaattgaaatatcttgaaaagagagagaacacctcttgagggggatgaaaatgtctgattatctagtcatcgtggaatcgcccgctaaggcgaaaacgattgaacgttacttaggtaaaaaatataaagtaaaagcatcaatgggacatgtccgggatcttccaaaaagtcaaatgggagttgacatagaacagaattttgaaccgaaatatattaccattcgaggtaaaggcccggtattaaaagagctgaaaacggctgcgaaaaaagccaaaaaagtgtatctcgcagctgaccccgacagagaaggggaagcgattgcatggcatttggcacacagtcttgatttagatctcaactcagactgccgtgtggtgtttaacgaaattacaaaagacgctattaaggaatcgtttaagcatccccgcatgatcaatatggatttagtggatgcacagcaagcgagacgtattttagacaggcttgtcggatataaaatcagtccaatcttatggaaaaaagtcaaaaaagggcttagcgcaggacgcgtgcaatccgttgccctccgtttgattattgaccgtgaaaaagagattaacgactttaagcctgaggaatattggacaattgacggtacgttcttaaaaggtcaagaaacctttgaagcgagctttttcgggaaaaacggcaaaaaacttcctttaaatagtgaagctgatgtaaaagagattctttctcagctcaaagggaatcaatatacagttgaaaaagtaaccaaaaaggaacgcaaacgtaatcctgctttgccttttaccacttctaccctgcagcaggaagcggctcgcaagctcaatttcagagcgaagaaaacgatgatgattgcacagcaattatatgaaggaattgatttaggaagagaaggaacggttggtctgatcacgtatatgagaacggattcaacccgtatttcaaatacggctgttgatgaagcagctgcatttattgatcagacatatggaaaagagttcctaggcggaaaacggaagcctgcgaaaaagaatgaaaatgcccaggatgcccacgaagcaattcggccgacatcagttcttagaaaaccaagtgaattaaaagcagtcctcggcagagaccaaatgagactgtataaattaatttgggagcgttttgttgccagccaaatggcaccggctgttctcgatacaatgagtgtcgacctgacaaacaacggtttgacatttcgtgcaaatggaagtaaagtcaagttttccgggtttatgaaggtgtatgttgaaggaaaagacgatcaaatggaagaaaaagaccggatgctgcctgacttacaagaaggcgacacggtattatcaaaagatatagaacctgagcagcattttacccagccgcctccgcgatatactgaggcccggcttgttaaaacccttgaagaacgcggtatcggccgtccatccacatatgctccgacacttgatactattcagcggcgcggctacgtggcattggataataaacgtttcgttccgactgaattaggtcagatcgttcttgacttgatcatggagtttttccctgagatcattaacgttgagtttacagctaaaatggagagagatcttgatcatgttgaagaaggaaataccgaatgggtcaagattatcgataatttctacaccgattttgaaaaacgcgtcaaaaaagccgaatcggaaatgaaggaagttgagattgaaccagagtatgctggagaggattgtgaattgtgcagttctccaatggtatataaaatgggacggtacggtaaattcttagcttgctccaacttccctgactgccggaacacgaaaccgattgtgaaacaaatcggtgtgaagtgcccgagctgcggagaaggaaacattgttgagcgaaaatcgaaaaagaaacgggtgttttacggctgtgaccgttatccggactgtgaattcgtatcatgggacaaaccaattgaacgaaaatgcccgaaatgcggaaaaatgctcgtcgagaaaaaactcaaaaaaggtatacaagtccaatgcgtggaatgcgattataaggaagaaccacagaagtagcggtgagcagggtcttgctcaccttctttgtgtgttaaaagaaggccttgaataataaactaggagatgtgaaagatgaaccaacaaacagtgaatgtaatcggagccggactcgcaggaagtgaagcagcatggcagcttgccaaacgtgggattcaagtcaaattgtatgaaatgcggccagttaaacaaacgcctgcgcatcatacagataaatttgctgagcttgtctgcagcaactctcttcgctctaatacacttgctaacgctgtcggtgtattaaaggaagaaatgcgtgcgcttgattcagccattatcgctgcggctgacgaatgttcggtgcctgccgggggcgctcttgcagtagaccgtcatgaatttgccgcaagtgtgacaaatcgggtgaaaaatcatccaaacgtaaccgttattaatgaagaagtgactgaaattcctgaaggccctactatcatcgcaacgggtccgttaacatctgaatcgctgtctgcccagctgaaggagctgactggagaggactatttatatttttatgacgcagcggcgccaattgtagaaaaagacagccttgatatggataaagtgtacctgaaatcccgttatgataaaggtgaagcagcatatttgaactgcccgatgacagaagaagagtttgaccgttttcatgaagcattaacatcagcagaaacagtgccgttaaaagaatttgaaaaagagattttctttgaaggctgcatgccgattgaagtcatggcaaaacggggtaagaaaacaatgcttttcggtccgatgaaaccagttggtctagagcatcctgttacaggaaaacgcccttatgccgtcgttcagctcagacaggatgatgctgcgggaacactttataatattgtaggattccagacacatttaaaatggggagaccaaaaggaagttctcaagttgattccaggacttgaaaatgtagaaatcgtcagatatggcgtgatgcatagaaacacatttattaactctccaagcctgttaaagccgacttatcaatttaaaaaccgcagtgatctgttctttgcaggccaaatgacgggagtagaaggatatgtggaatcagctgcctcaggacttgtagcaggcattaatgcggcgaagcttgtattgggagaagagcttgtgatcttccctcaggaaacagcaattggcagtatggcacattatattacaacaacaaaccagaagaacttccagccgatgaatgcaaactttgggcttttgaaagaattgccagttaaaattaaaaataaaaaagaacgaaatgaacaatacgcgaaccgtgcgattgaaacaattcaaacaatttcgaaaacaatataggtattgattgcaacctgagcgcgatttgtgataccatttaaaagcccttcctggggaggtattaggcatggagaatgttaagaatttcgtaaagttattcgttgaatatttacaaattgaaaaaaattattcacaatatactattgtgaattatgtggattcaattgaagaattcgagactttcctgcgcgttcaaggtataaatggatttgaagaagctgcatatcaagatactaggatttttttgacagaagcctatgaaaaaggtttatcgagaagaacaataagcaaaaagatatctgcattaagaagcttttataagtttctgatgcgggaaaagcttattgaagaaaatccgtttcagcttgttcatctgccaaaacaggagaaacggataccgaagtttctatatcaaaaagagcttgaggagctgtttgaagtttcagatataagccagccggccggaatgagggatcaagcgctgttagagctgctctatgccactggaatgagggtcagtgaatgctgttccataactattaacgacgttgatttatttatggacactgtgcttgttcacggtaaaggcaagaagcagcgctatatcccctttgggtcttatgcccgcgaagcgttgaaggtatacatgaatagcggaagacagtgcttgctgatgaaggcaaaagaacctcatgatctattattcgtaaatcaaagaggcggaccgcttacagcccgtggcatcagacatattttaagcgggcttgttcaaaaagcgtcaagcactttacatatccatccgcatatgcttcgacatacgttcgccacgcatctgttaaatgaaggagcggatttgagaagcgttcaagaactgctcgggcattccaatctgtcttctacacagatatacacgcacgtttcgaaggaaatgttgagaaacacatatatgtctcaccatccaagagcatttaagaaaaattaaaggaggccctttatgtcatcttttcatgcgaccacaatatttgccgtacagcataaaggacgaagcgctatgtccggagacggccaagtaacatttggtcaggctgttgtcatgaaacacacggcacggaaagtgagaaaactgtttaacggcaaagttcttgctggttttgcgggatctgttgcagacgctttcactttattcgaaaagtttgaagctaagcttgaagaatataacggcaacttaaaacgggcggctgttgagcttgcaaaggaatggcgcagtgataaagtgctaagaaagctcgaagccatgctgattgttatgaatcaggatactttgcttctcgtatcgggaacaggcgaggtgatcgaaccagatgacggcattctcgcgattggatcaggaggcaattacgctttggcagcgggaagagcactgaaaaagcatgccggggaaagcatgtctgcaagtgagattgccagagccgcgttagaaacagcaggcgaaatttgtgtttacacgaacgatcaaatcatactggaagagcttgaatagaaaggacttgaggcgcatggaaaaaaaaccgttaactcctagacagattgtagatcggttagaccaatatattgtcggtcagcaaaatgcgaaaaaagctgtcgccgtggcattaagaaaccgctatagaagaagtcttctggatgaaaagctgaaggacgaggtcgttccgaaaaacattttaatgatgggtcctaccggcgtcgggaaaactgaaattgccagacgaatcgctaagctttcaggtgcgccatttatcaaaattgaagctactaaatttaccgaagtcggctatgtaggcagagatgttgaatcaatggtcagagatcttgtggagacttctgttcggcttataaaagaagagaaaatgaatgaagtaaaggaacaggcagaagaaaatgcaaacaaacgcattgttcgtctgttagttcctgggaagaaaaaacaatctggtgttaaaaatccgtttgaaatgttttttggaggcagccagccgaatggtgaagatgaggcggagagccaggaagaagcaaacatcgaagaaaaaagaaaacgaatggcgcatcagctggctttaggagagctcgaagactactatgtaacagtagaagtcgaagaacagcagccttctatgtttgacatgctgcagggctcgggtatggagcagatgggtatgaacatgcaggatgcgctgagcggattaatgccaaagaaaaagaagcggcgcaaaatgacagtcagagaagccagaaaagtcctgacgaatgaagaagcaagcaaactcatcgatatggatgaagtcggccaggaagctgttcagagagcagaagagagcgggattatctttatcgatgagattgataaaatcgcaaagaacggcggtgcatcttcttctgccgatgtttcaagagaaggtgttcagcgggatatccttccgattgttgaaggttctaccgttgtcacaaaatatggttctgtaaaaacagaccatgtattatttattgcagcaggagcgtttcatatggccaaaccgtctgatttgattcctgagctgcaggggcgtttcccgattcgtgtagaactgaacaaactcacggtagacgacttcgtgagaattttggttgagccggataatgcgctgctgaaacaatatcaggcattattgcagacagaaggtatatctcttgaattttctgacgaagctattcataagattgctgaagttgcttatcatgtgaaccaggacacagataatatcggtgcgagacgccttcatacaatacttgaacgcctattagaagatttgtcgtttgaagctccagatgtaacgatggagaaaataacgattacaccacagtatgtcgaagaaaagctcggaacgatagccaaaaacaaagatttaagtcaatttatattgtgaaaaatttaatatgaggaatgtttaggaggattatttatcatggctttattacaaaaaacaagaattattaactccatgctgcaagctgcggcagggaaaccggtaaacttcaaggaaatggcggagacgctgcgggatgtaattgattccaatattttcgttgtaagccgcagagggaaactccttgggtattcaattaaccagcaaattgaaaatgatcgtatgaaaaaaatgcttgaggatcgtcaattccctgaagaatatacgaaaaatctgtttaatgtccctgaaacatcttctaacttggatattaatagtgaatatactgctttccctgttgagaacagagacctgtttcaagctggtttaacaacaattgtgccgatcatcggaggcggggaaagattaggaacacttattctttcgcgtttacaagatcaattcaatgacgatgacttaattctagctgaatacggcgcaacagttgtcggaatggaaatcctaagagaaaaagcagaagaaattgaagaggaagcaagaagcaaagctgtcgtacaaatggctgtcagctcgctttcttacagtgagcttgaagcaattgagcacatttttgaggagcttgacggaaatgaaggtcttcttgttgcaagtaaaattgctgaccgtgtcggcattacccgttctgttattgtgaacgcactcagaaagctggagagcgccggtgttatcgagtctagatcattaggaatgaaaggtacttatatcaaggtactaaacaacaaattcctaattgaattagaaaatctaaaatctcattaatcacaaaaagaaccctttttgagggttctttttttatttcaaataaaggaaatcaataagctttatttcctgggttgaaagtctttctatgtaataattttaataaattttgcatttttcttcaaaaagtttcaaaaatgccgaaaagaaaggagaaaaaacagaaattctgctattttcaggcttatatcaaggcgagaaatgtagttctaacaatctaggactttatacctagttgcaaaatagataattgtgaggacatttttttacacgaacttcatagactttatgcctgttatttcttacaataagcatatagttttacaattctcgacaaggatattgagggtgaaaaaaactgaaatggaggtaagtggatttgagcttattttctggaacgatacaaaatcttgaaaatgccttgagcagagcggatattaagcaaaaagtcataactaataatatcgccaatatagatacaccgaactataaggcaaaaaaagtctctttccaaaatttattagatcaagaatcctcgcgtcttgaagcgataaaaacagactatcgtcatgttgatttttctgatactgattcgaattattcaattgttgcgagcggagatacatcgtatcagcaaaacggaaacaatgttgatgttgacaaagagatgacagaattggcgcaaaatcaaatcaactatcaagctttggttgaaagaatgaacggtaaatttaattcgctgaagaccgtattaacaggaggaaaatgatgacagcttttcatagcttaaatgtttcagcatcggctttaacagctcagcgagtcagaatggacgttgtatcatctaacttagcaaatatggatacgacaagagctaagcaggtgaatggagagtgggtgccttacagaagaaaaatggtttcccttcagtcaaaaggtgaatcgttctcttccattctcaattctcaaatgagcggaagcgggaatgctggaaacggtgtgaaggtttcaaaaattacggaggatgattcggattttaatcttgtctatgatccgacagaccctgatgcaaacgctgaaggatatgtacaaaagcctaatgttgatccattaaaggaaatggttgatcttgtcagcagcactagatcatacgaggcgaatgtcacggcgatgaatgccacaaagggaatgctgatgaaggcgttagaaatcggaaagtaggtgaatgaatgtgattaatgcaatttctccttttcaggttcaaaatactcaaaacactcaaaatgcaacaaatcaagtaaacaatagccaaaaaacagattcttcaaatcaaacaagcttttcggagcttttaaaaaactctattagttcgttaaatgagtcccaagtagcttctgacaacatgactaatgccttggctgcaggaaaagatgtaaatcttgatgaggtcatgatcgctgctcaaaaagctagcatctctctaactgcagcaacagagttccgcaataaagctgtggaagcttatcaggagattatgagaatgcaaatgtagggggtctgacgatttagagaaagagtggaatgaccgggggttaacatgaatcgtactctaatgcaaatgaaaaacaaaacgagtgagttttggaaaaatagatctaaattacaaaagattttaatggttagtgctttagcggcaattattattattggaattattattagtgtttttgcttcaaattctaaaatggcgccgctgtacaaagatttgtctgccgaagaagcaggacaaatcaaagaagaattggatgcaaaaaaagtgccaaacgaactttcgaatggcggtacagtgattagtgttccggaggatcaggttgattctttgaaagtgcagatggctgcagaaggacttcctaaaacgggatcaattgattattcgttttttggacagaatgccggctttggtttgacagacaatgagtttgatatggtgaaagtgaaagctacacagacagaactgtcaaacttgatcaatgaaatggacggtattaaaaattcaaaagtaatgattaatctcccgaaagacgctgtgtttgtcggtgaagagcaatctgcagcatctgcatcaatcgttttgcagattcaaccgggttatacacttgatcaaagccaaatcaacggattatatcatctggtatctaaaagcgtgccaaacctaaaagaagataacatcgtcatcatggaccaaaattctacatactacgacaaatcagacagcgatgcagggtcctacgcggatagttattcttctcagcaaggaattaagtctcaagttgaaaaagacattcaaaaacatgtacagtcactgctgggtacgatgatgggccaagataaagtcgttgtctccgttacagcagacattgatttcacaaaagaaaatcggacagaagacattgtcgaacctgtggataaagaaaacatggaaggcattgcagtcagcgctgaaaaggtatctgaaacatatcagggcgacggtgcagccaacggcggaactgccggaaccggcgaggaagatgttacaaattataaggctgacggtgaaaataccgaaagcgggaactacgaaaaaaacagcaacaaaatcaattacgaggttaaccgaattcataaagaaatcgctgaaagtccttataaggtcagagatttagggattcaagtaatggtagagccgcctgatgccaaaaacactgcgtcgctatcaactgaaagacaggatgatatacaaaaaatcctttcaactgtagtcagaacatctttggataaagatgaaacgcaaaatcagaatttatctgatgctgatatcaataataagattgttgtttccgttcagccattcgacggaaaagtcaatttggatacaaatacggaagaatcctcaggtatcccgctgtgggcatatattgtaggcggtgttttaatcgcagcgatcattgttctgatcattatgcttatcagaaagaaacgggcgcaagaggatgaatttgaggaatatgagtatgaggttcctcaagaaccaatcaatttgcctgatatcaacgaagaggaaaatgaaacagcggaatcagtcagacgaaaacagcttgaaaagatggcgaaagacaagccggaagattttgcaaaactgctgagaagctggctggccgaggattaggaggaattagaaatggcgagacgtgatcaagataagcttacaggaaaacaaaaagcagccattctcatgatttccttggggttagatgtgtcagcttctgtctataagcacttaaccgatgaagaaattgaaaggcttactctggaaatatcaggtgttcgaagcgtcgatcatcaaaaaaaggatgaaatcatagaagaatttcataatatagccattgcgcaagattatatttctcaaggcggtttaagctatgcaagacaagttctggaaaaggcgcttggagaggataaggcggagaacattctaaacaggctgacttcttctttgcaggttaaaccatttgattttgccagaaaagcggagccagaacaaattttgaattttatccagcaagagcatccgcagacgatggcgttaatcttgtcttatttagatccagtgcaggccgggcaaattttatccgagctgaaccctgaagtgcaggctgaggttgcgagaagaatcgcggtcatggatagaacgtctccagaaataattaacgaggtagaacggattctggaacaaaaattatcttctgcatttactcaggattatacacaaacaggcggaattgaagctgttgtggaagtgttaaacggggtagacagagggacagagaagacgatcttggattcattggaaattcaggatcccgatcttgctgaagagattaaaaagcggatgtttgtcttcgaagatattgtcacacttgataaccgtgcaattcagagagtcattcgcgatgttgagaacgacgatttgctcctttcattaaaggttgcaagcgaggaagtcaaagaaattgtgttcaacaatatgtcacagcgtatggttgaaaccttcaaagaagaaatggagtttatgggccctgtacgtttgaaagatgtagaagaagctcaatcaagaattgtaagcatcgtcagaaagcttgaagaagccggtgaaattgtaatagcaagaggcggaggggatgatattattgtctaatatcattaaacaagaatcatctatttctccacaaaaggaaaaaagaaaactttctatacaagaggtgcgtattgatcattctcaccttttgcaggctgaagagaacccggaggcgcttatggcccgagtgaaagaggaagctgaccggatttctgagcaggcaaacagtcatatagaaaatattcgccgtcaaattgaacaggagaaaaacgattgggcggctgaaaaacagaagcttattgaagaagcaaaagccgagggctttgaacaaggagtagcgctgggcaaagctgaggcaatgaaacagtatgcagaactgatcggccaagcaaacagtataactgaaatgtccagaaaagctgttgaggacaagcttgaagacgctaatgaagaaatcgttgagcttgccgttgccctagcaaaaaaagtttggcagcaaaagtctgatgataaagaggctttcctcctgcttgtacaacaggttataaacgaagtgaaggaatatgacgatatatcaatttatgttgatccatattactatgagacaatctttcagcaaaaagatgaaatccagcagcttctttataaagaatgtcggcttggcatatatgctgatgaaaaagctcaaaaaggaacctgttatattgaaactccttttggcagggtagatgcgagtgttgacacacaattgatgcaattgaaagataaacttctgacagcgctggaagcaggtgcagctgaatgaagacacagagtctgatagattgtatagaaatgacagactcgtataaacggtacggaaaagtcaagcgggtaatcggcttgatgattgaatcaaaagggccagcaagctcaattggtgacctgtgcctgatttatgcaaaaggacagtctgggaaagtcattaaagctgaggtagtcggcttccaggaagaaaatattttgcttatgccttatttagaggctgcgagcattgcacctggcagcattgtagaagctactggggaatcacttcgggttaaagttgggaccggactgatcggacaagtcatcgatgcttttggagaaccgcttgacggaaagcttctgccgaaagggctttcgcctgtatcaacggagcaatcaccgcctaacccgatgaaacggccgcctatccgtgaaaagatgggtgttggagtcagatcaattgacagcttgctgacagtcggtaaaggccagcggattggaatttttgcaggaagcggtgtcggaaaaagcaccttaatggggatgatcgccaagcagacagaggctgacttaaacgtcattgcacttgtcggagaacgcggacgagaggttcgggagtttattgaaaaagatctggggaaagaggggctgaaacgatcgattgtagtcgttgccacctcagaccagccagcattaatgagattgaaagcggcatatacagcgactgcaattgccgagtatttccgagataaaggccaaaatgtcatgtttatgatggattctgttacaagggtggcaatggcgcagcgagagattggactggctgcaggagagcctccgacgacaaaaggctatacaccttcagtgttcgctattttacctcgtttactagaacgaacaggtgcaaacgagcatggaaccattacggcattttatacagtgttggtagatggggatgacatgaatgagccgattgccgataccgtacgcggaattttagacgggcatattgtgttggacagggcgcttgccaataaaggccagtttcctgcagttaacgtactaaaaagcatcagcagggtgatgtcaaacatttcaacaaaacagcatctggatgcggcaaataaattccgtgaacttttatcgacatatcaaaattcggaagatctcattaatatcggagcttacaaaagaggatcatccagagaaattgatgaagcgatacaattttatccgcagcttattcaatttttaaagcagggaacagacgaaccggctttattggaagaaagcattgctgcattaactagtttgacaggaaatgaggaataaacgtggcttatcaatttagattccaaaagctgctggaactaaaagaaaatgaaaaagaccaatccttatccgaatatcagcaatcagtttctgaatttgaaaacgttgctgaaaaattatatgagaatatgagcaaaaaggaattgctggaacaaaataaggaaaagaaattaaaaagcggcatgagtgtacaagaaatgaggcactaccaacaatttgtctcaaatcttgataatacgatctatcactatcaaaagcttgtcattatgaaaagaaatcaaatgaatcaaaaacaagaaattttgacagagaaaaacattgaagtgaaaaagtttgaaaaaatgcgtgaaaaacagtttaaaatgtttgctcttgaagataaagctgcagaaatgaaagaaatggacgatatttcgattaagcagtttatgattcaaggccattaggagcgaatgtaatgtccggcaaaaagaaagaatcaggtaagttccgttcggttttgcttatcattatcctcccgctgatgtttctattaatcgcaggggggattgttctttgggctgctggtatcaatgtcttaaagccgatacaggatgctgcggcaaaaacgccggttcttaaagaattggtccctgaaaccgaaaataaaaaaggcgcagcatcaagtaaggatagcagtaatacggcagctctggaaaagaccattaaggatcaaaaaagtgaaatcagtatattgaataaagatttagaaacaagtaaatcagaaatcgacaggctcaatcaaaagatccgttcacttgaaaagacggctgaggatcaaaaaaagtcatcagaagatcatactgaaggatcagcagactcgaaagcttcttctgaaaatgacaaagtgatcagtgtgtacaaaagcatggacagcggaaaggctgctaaaattattgcccaattaaaggagcaagaagcactgaaaatattgaatggcctaagcaaaaagcagcttgctgacatattggcgaaaatgactcctgagcaagcagcaacctatacagaaaaaattgctgccagccaagaatagggggaatgaaaggtgaagctgcttgaattagccggacctttgctgcaaaccacaacgggttctgccgctaaaaacatgaaaagtagccagggagtttttcaaaactggcttatgtctgaggctggattgaaggaactttcagaacaaggaaagggaactcctaattctgaagatcagcttttagcagatgcgcttaaaaagatcggtgaatggctaaatgcaagtcctgaagatcaagacaaacaaaatgcggatcttttgcaaacattaagcaaactgacagggaagcaattggatgcgaatgctctgcaaatgttgcaaaatcttttgcaagcagttgaatcaaaaatgtcaggcgggacggatcaattgctcacagaaacggagaaaatcttttcagaagctaaaacggctctgagtgccaatgattctgcttctgacattaatggagcactgaagtctgataaagagcaatcaaatcaggaaaatgaagtatccgagcctgcaaaagagcttatctatatccagatgttcattagccagctcgtagaagggaataagctgactgatctcgggaatggcaatgaagctcatgccatttaccaaaatggagatcaattcctttctgcattagaaaagaagggtgtatctcaacaactaattcaggatcttaaacagcaaatattcactaaagctgagtcaagttcaaaactttactcgatgacagcgtcagagctgaaaagttttcaaagcttaatggatcaaatgtctatgcttcctcaaaaagggaccaaagaatggagtttagctgaaagccagctgaaagccttcttgttatcgaaatcatccgaatcatcacaagactttgggaagagtgttctcacaccgctctcgcagagttcatccagcaaaaatgcatcggatgtttctggaagtattcagcctgtagatagtaaatcaggactccaaatgctgttttcggggtatcggggcataggaggagttcaaacacttgatctgcagcagatgtcatctgatataccaaatgccgaaacaaaaacggtggctgatcaagtgattaatgcgtggaagcagatgaaatatacgcctttcggcagatcgacgggaagtttcactattcggctgaaccctgaacatttaggatttgtcacaatcaagctgacaaatgaaaatggaatgtttcagagtaaaatcatagcatctagccaatcagcaaaagaattgcttgaacagcatcttcctcagctgaagcaatcattgccgaatatggccgtccaaattgaccgttttactcttccggtccaaagcggggatcagccgatatacggccagcttgctgatgaacagaaacagcagcaagaggggcagagacagcaaagacagaaaaagcaatcaaatgattttggcgatctgctcgatgaagtgtcgatggttgaaatggaggaagaagaatgacttctataagttcagaatataaactgcctgaaaaaacgaacactgtgtcgacgaacaacagcagcttggggaaagacgagtttttaaaaatattaatgactcaagttcaaaaccaagatccgcttaacccgattgacgataaagaatttatcagccagatggcgactttttcaagcttggagcaaatgatgaatctgaatacgacaatgactcaattcgttgaaaaccaagatccgtttacaacgtatgttgattggatgggaaaagaagtatcttggactgatggtaaaagtgcaacagataaaacaggcacagtaagctctgttaaacattttaaaggaaattattatctcgttcttgatgatgggaccgagatcagtcctgcgaatgtcatgtctgtgggacaatcatctaaataaaaacatctgggggaatatattatgttacgttcactttattctggaatcagcggtatgaaaaactttcaaacaaagcttgacgtaatcggtaacaacattgccaacgtaaatacagtaggattcaaaaagagccgtgtgacctttaaagatatggtaagccaaacgattgccggcggttctgctgctggtgcaacaatcggcggaacaaactctaagcaaatcggtttaggttcatcatctggcacaattgatacaattcattcaacaagcgcgacacaaagcacaggaagaacacttgatttagcaattgacggcgacggttacttccgaattgatacaggtgacgggacagcttatacaagagcagggaacttctatttagataatactggaacactggttacaggtgatggctaccatgtactaaatatgaatggcggaacaattaaaattcctactgatgctcaaagctttagcattggttctgatggaaaggtgtcaattgttgatgctgaggggaaaacacaagacgggggacaaatcgggattgttacttttgccaacagtgatggattggataaaatcggaagcaacctataccgtgaatctttaaactctggaacggccagtgcagcgaaccagcctggtgacggcggaactggtgctcttaaatcaggatttctcgaaatgtctaacgtcgatttaactgacgaatttactgaaatgatcgtagcccagcgcggattccaatcaaactcaaaaattattacaacatctgatgaaatccttcaagaactggttaaccttaaacgttaaggagggaggggaggcgagtaatcgcttctccgctgttttatgattaaagtaacccgtttgaacgggcagccctttacactgaatgcgctatttattgaacagattgaatgttttccggatactacaattactctgtcaaatggtaagaagtttgtagtaaaagaagatgaagaagctgttctggaaaagatcgcagctttctaccgaaaaatacaaatatttgcaatggatcaaggaatagaggaaccggaatgaagaaaaagttaatgatcatattactaattattcttatcgtaattggtgctctcggggcggcggcttattttgttttaggcggaaagtccgaaaaaagtgaagcgaaaaaaagtattgatgaaatcgttgcgtcttctgttgatgtagaagagatcacaacaaatttaaagtctgataacattatccgtcttgctattaaacttgaaactgattctgataaatcaaaagaagaacttgagaaacgtgatttccaagtgaaagacgctgttatatcactgctggctgatacgaatgctgatcagattgagggagacaagggaaaagaaacctttaagaaggaactaaaagataaaataaatagctacctccaagaaggaaaagtagaaaaagtgtatattacctcctttaatctgcaataaagcataatttgacagaatacggaggtgaggaaaatgtcaggagaagttctctcccaaaatgaaatagatgcactgctctctgcaatatcaactggtgaaatggacgctgaagagctgaaaaaagaagaaaaagagaagaaagtcaaggtttatgatttcaaacgtgcgctgcggttttctaaggatcagatccgcagtttaacgagaattcatgacaattttgcaagacttcttaccactcatttttctgctcagctcagaacctatattcacatatctgtcagttctgttgatcaggttccgtatgaggaatttatcagatcgattccaaacatgacgattctgaatctatttgatgttcatccgatggaaggaagaattatgatggaggtcaaccccacgatagcttatacgatgatggatcgagtcatgggcgggattggaatcagtcataacaaggttgacagtttgacagaaattgaaacaaaaatcatttctaatttatttgaaaatgcactgggtaattataaagaagcttggcagtcaattgctgatattgaaccggaaatgactgagtttgaagtgaatccgcaatttgttcagatggtatctcctaatgaaacagtcgtggtgatctcgctcaatactcaaattggtgaaatcagcggtgtcattaatctctgtatcccgcatattgtactcgagccgctcataccgaagctttcagtccactattggatgcaatcagaccgaaatgagccaaagcctgaggaaacaaagtcgcttgaaaaacgtatcatgacagcacaaatacctgtcgtggccgagctcggcacatctgaactgacgatagaagagtttttaagtttagaagtcggagactgcataactttggacaaatcagtcacggatcctcttactgtattggtcggagataagccgaaatttttaggacaagccggccgggtgaatcgaaaacaggcagtgcaaattttagatcacgacataagaggtgaacaagatggagaataatagattatctcaagatgagattgacgcgcttcttaacggtactggcagcacgcttgatgagccagagattccggaagtagatgacttatcggaaatggagcgtgatgcgatcggtgaaatcggtaatatttcattcggcagttctgcgacagcactgtcaacgcttttaaatcaaaaggtcgatattacgactccaagcgtaacggtcattccaagaagtaaaatcagcgatgcgtttcctgaaccgtatgtagcgattgaagtgaattatacggagggcttcagcggaagcaacctgttagtcgtggaacaaagtgacgcggcgatcattgcggacttaatgatcgggggagacggaaaaggtgcggacccttcactgggtgaaatccatttaagtgcggttcaagaagcaatgaaccaaatgatgggatcggctgccacatcaatgtctactgtattcagtaaaaaaattgatatttcacctcctcgggttgaattgctggatgttactgaagaaaagggtacagaccgtattcctgatgatgaaatgctggtgaaagtttctttcaacttaaaggtgggagaattaatagactccagcattatgcaactttacccattgacatttgcgaaagatttaatttcaagccttatgaactcagaaagtgcagaggaagaagaaacggtgcagcctgaagttacatacgaacagccgaaagagcctgtgacgccagagccgcgtattgaaccgaagcaacagcagcagccgccaaaaaggcagggaacagcaaaaaaagcagcgccagttcaggtttcaccggtggaattttccgcgtttgatccaaacgaagctgtacaagcccctattcataatctggatatgcttttggatatcccgctttcgattactgttgagcttggcagaacgaagagaagcgtaaaagagattttagagctttctgccggaagtattatcgagcttgataaattagccggtgagcctgtagatattttagttaatcagcgtatcgttgccaaaggcgaggtcgttgtcattgaagaaaacttcggagtgagagtcactgacattttaagccaggcagagcgcattaataatttaaaataacgaaacacaaggagagagatagattatggcacatagaattttaattgtagatgacgcagcatttatgcgaatgatgattaaagatattttggttaaaaatggttttgaagttgtggcggaagctgaaaatggagcacaagcggtagagaaatataaagagcattcacctgaccttgttactatggatatcacgatgccagaaatggatggtattacagcattaaaagaaattaaacaaattgatgcgcaggcaagaatcatcatgtgttctgctatgggacagcaatcaatggttattgatgccattcaggccggcgctaaggatttcattgtgaaacctttccaggctgaccgtgtgcttgaagcaatcaacaaaacattaaattaaagggtgtacgactgttgaaaaagagtcaatattttattgtttttatttgttttttcgttttattcagtgtacatccgattgctgctgccgcggcagactctgataattcaactgtaaacgaatggtttcaaaagaaagatgaaaaaactgcagatcaatcagagcaaaagaaagaaaaaacaacaaaaactgctgatgagacggagggagcggctgctccttctgtctcagcttttgattttgtaaagatgattttcgctttactgtttgttatcgtgctgatttacgggctggttaagctcatgaacaaaagaaatcggctcctaaagccttttcaatatgttgaaaatattggcggcacatcggtcggtcagaacagatccatacaattgatcaaggtcgggaaaagtgtgctcgtcgtcggtgtaggagagacgatccagctgctgaaagaaattgaggatgaaaaagagattgaagtcattctcagtcagcatgaagaggcaatgtcaagcaaaatagagtggcaaaagtttgtgaagccgcttaagagttctgaacatcagccgcagcaaaaactgccttcattttcaaaagcattaaaagagcaacttgaagagttaaaacaaaaccgttctgaaggaaagaagaaaggcccacgtcatcatgaatgagtttataaatattttcagttcaagcgatccggaaaacgtaagttcgactgttaaattactattattgttaactgtattttcagtggcgcctggaatattgattcttatgacttgttttactcgcatcgtcattgttctgtcatttgtcagaacttcacttgcgacgcaatctatgcccccaaaccaggttctaatcgggcttgcgctgtttttaacattttttattatggctcctactttttcagaaattaataaagaagcgctgaccccattaatggacaacaaaatcagcttggatgaagcgtatacgaaagctgaggaaccgattaaagaatttatgagtaaacacacaaggcagaaggatctggcgctgtttatgaattacgcgaaaatggataaacctgaatcattaaaggatattccgttaacaacaatggttccggcttttgccatatcggagcttaaaacagcatttcaaataggttttatgatttttatcccttttttaattatagatatggtagtggcgagcgtcttgatgtcaatgggaatgatgatgctgcctccagttatgatttctctgccctttaaaatattactttttgttttggtagacggctggtatttaattgtgaaatctttgcttcagagcttttagggtaggtgctaaacgtgagttcagaatttgtaatttctatggcggaaaaagccgtatacgtaacgctgatgatcagcgggccattattggctattgctttactggtcggtttaattgtcagcatatttcaggcgacaactcaaatccaggaacagactttggcgtttattccgaaaatcgtggcggttctcctggctctcattttttttggtccgtggatgctgtcgacgattctttcatttacaacagagctgttttctaatttaaatcgttttgcagggtaatgtagagatgaattcaattattgacttatttcctgcttttttattggtttttattagaatctctgctttttttgtaacgattccgctatttggacatcgaaatgtgccagctgttcatcgcataggttttgctttttttcttgcggtcatttgtttcagcaccattgataaaccgccctctttggagatagatgagcactatatgcttttggcgtttaaagaagctttggtcggcctatgtctgggtttaattgcttatatgatgattgccgcagtgcagattgccggctcgtttattgattttcaaatgggattttcaatagcaaacgttattgatccgcaaaccggtgcacaaagtccgttgattggccagtttatctatacgatggcacttttgtttatgctgagtgtcaatgcccaccatttgttgctggatggtatttactacagctttcagtatatttcagttgatcaggcatttccgaatttcggcgatgaaaagtttgcctattttattgcgaaaagctttaatgcaatgtttattatcgcttttcaaatgtcagcgccggttgtggccagtttgtttctagttgatttagcattaggtatcgtggctcgaactgttccgcagttaaatgtatttgtggtcggtctgcctttaaagatcgctgtcagtttcattatgctcattgtatgtatgtccgttatcttcgtcgttgtccggaatgttttcagtttaacgattgaaacgatgcggaatcttttagcattggtcggtgtttcttaatgaagcttagagttgacctgcagttttttgcgggagagaagacagaaaaagccactccgaaaaaacggaaggatacgcgaaaaaaagggcaggtagccaaaagctcggatgtcaataccgccgtttctttactggtaatattcctttcgcttattgcaattggtccgtatatgagagacaggctgctgtcattcatagaaacattttataccgaatcgctcacaatgaagctctcagaatcaaatgtgcatacattgtttgtcagcttattaaaggatatgggcatgatactcgcaccgatcttgcttgttgctcttgttgcaggagtcgtaagcaactatatgcaggttgggttcttgttttctgctgaagtgatacagcctaagcttgaaaaactggatccgatcaaaggctttaaacgaatatacagtatgagggcgattgtagagctgattaaatcaattttgaaaatcgtagtcgtcggttttgcggcttttgctgtgctttggctgcattatggagaaattctccggcttcctctcctgacacccgaagaggcactttctttcgtttcaaaactcactttgtggatgggactaagcggtgcaggtgcattgttgattcttgctggtctcgactatttatatcagagatttgactatgagaaaaatatcaaaatgtcaaaacaagatataaaagatgagtacaaaaaatctgaaggagacccgattatcaagtctaaaattaaacaaagacagcgggaaatggcgatgaggcggatgatgcaggaagttccaaaagcagatgtcattatcacaaacccgactcactatgcgattgctttgaaatatgatgaagaaaaaatggacgcaccttatattgttgcaaaaggcgtcgaccaccttgcgttaaaaatcaggaaaattgctaaagagcatgatgtcatgatggtagaaaacagaccgcttgcccgtgcgttatatgatcaagtggaaattgaccaggcagtgccggaagaattttttaaagttttagcagaaattctggcttacgtatataaaacaaaacaaaaagtatattgaatttttcgatttaaaaggagagaaaaaacagcatgtcaacaagagatttatccgttttaataagtgttgtcctcattgtggcgatgctggtgattccatttcctccatggctgttaagtattttgatcattattaatatttctcttgcgttgatcgtgcttctcaccacaatgaatatgcaggaagcgcttcagttttcgatttttccgtcactgttgctgcttttgaccctatttcgtttgggcttgaacgtctcaactacccgttcaattctttcacacggtgagggaggtaaagtcgtcgagactttcggaaatttcgttgtcggcggaaatgtattagttggactcgttgtatttatcatccttattattattcagtttatcgtcattacaaaaggtgctgaacgtgtttccgaggttgcagcaaggtttacgctggacgcaatgccggggaagcagatgagtattgatgctgatttaaacgcagggatgattaccgaacaggaagcgaagcatcgccgcgaaaaagtggcaagagaagcagacttttatggagcaatggacggtgccagtaaatttgtaaaaggtgacgccattgccggaatcatcattgtgatgatcaatattattttcggaatcgtgatcggaatgcttcagcagggcatgtccattcaagaagctgcttcacactttacgatgctgactgtaggggatggaattgtttcgcaaatcccggcactgttaatttctacggctacgggtattgtggtcacaagagctgcatctgaaggaaacttagggcatgacattacaggccagctgtttgcgtatccaaagcttttatacgtcgcagcagctacgatcatgcttttaggtattttcactccgatcggcatccttctgacggggccgcttgcgggattgcttgcttttggcgcatatacactatctaaatcaggtaaggaaaaagaagaagtggatgagattcttgaggaagaggctgaggtggacgagcttaaaagccctgaaagtgttgttcagcttctgcatatagatccgatagaatttgagtttggatatggcctgataccgcttgctgatgccaatcaaggcggtgatttattagaccgaattgttatgatacgccgtcagttggctttggaactcgggcttgtcattcctgtcgtgcgaatcagagataatatagcgttgcagcctaatgaataccgattgaaaattaaaggaaacgaagtagcaaaaggcgagctgttgcttgatcattatttagcgatgtcgcctactcctgaggacgatctcattgaagggattgaaacagtggagccttcattcggactgccggctaaatggattagcgaagcggtaaaggatgaagccgacatgcttggttatacagtagttgatcctgcatcagtcgtttcaacgcatattacggagaaaattaagcagcatgcccacgaattgatcggaaggcaggagacaaaacagctgatcgatcacttgaaagaatcgtatccagtcctggttgaagaggttacgccgaatccattgtctgtcggtgatattcagaaagtgcttgctaagcttttaaaagaaaaagtttcaattcgaaacttagtaacgatttttgaaacacttgctgactatgggaaattaacaacagattctgatctcttgacagagtatacaagacaagcgcttgctaaacaaattacagcccagtttgccaaagaaaatgaagtgttgaaggttgttacttgttccggccgtgtagaaaaagcaatagcagacggtgtgcagcagacggaacacgggaactatttatcacttgaaccagatatttcagaaagtatagtgcgctctgtcgccaaagaagctgaacagctctcattacgtcaggaaaccgcgattcttctttgctcgccgcctgtcagaatgtatgtgaagcagctactggaacggtacttccctgatcttccggtactctcttataacgaacttgaggcgaatgttgaggtacaaagcattggagtggtggatatttaatgaaaataaaaaaatttactgctgcttcaatgcaagaagcggcacttctcatcagaaaagagttaggtaatgaagcggtcatattaaattcgaaaaaaattaaaaagcgaaaatggtttggcctcgtcaacaagcctgctgttgaagtaatcgccgtattggatcaggactttcttgagaaaaaaacgcctcagaaggcagctgaaccgaaacaaacattaaaaactccggtcagcagtccaaaaatagaggagagaacatatccccctcaaattccggcgcaacaggagctaggtgatttttcagcatatcaatctgtacttcctgagccgctgcgaaaagcagaaaagcttttgcaagaaacagggatcaaagagtctacgaaaacgaacactctgaaaaaattgcttcgcttctctgttgaagcaggcggcttgactgaagaaaatgttgtcggcaaacttcaggaaatactatgcgatatgctgccctcagcagacaagtggcaggagccaattcattcaaaatatatcgttctctttggttcaacaggggctggtaaaacaactacactggctaaactcgcagccatatctatgcttgaaaaacataaaaaaatcgcttttattacaacagatacgtatcgtattgcagctgttgaacagttgaaaacatacgctgaactgctgcaggctcctctggaagtttgctatacaaaagaagaatttcagcaggcgaaggagctattttctgagtatgatcatgtgtttgttgatacagctggaagaaacttcaaagacccgcaatacattgatgaactgaaagaaacgattccttttgagagcagcattcagtcatttcttgttttatccgcgactgcaaaatatgaagatatgaagcatattgtcaaacggttttcatccgtccctgtcaatcagtatatttttacgaaaatagatgaaacgacttccttaggttctgtatttaatatactggcagaatcaaaaataggtgtcgggtttatgactaacggccagaatgtgcctgaggatatacagactgtatctccacttggttttgtgaggatgctgtgcagatgaacagatatgaccaagcagcaactttacgggcgaaaatggaaaaacgtgagcgcgttctgccaatggtttattcacaaaaagcgaagacacttgctgtcatcagcggcaagggcggtgtcggaaaatccaatattaccttaaatatggcacttgcgctgcaggataaaggtaagaaggtgctgctcatcgaccttgatatcgggatggggaacattgatatattaataggaaattcatcgtctgccacgataatcgatgttttaaccgatcgtaagcctttgctgcagtcattatccgttggcccaaagggtttgcggtatatatcagggggaaccggtcttgatgtgatgtttcagctcgatcagagaaaatggacgttttttgccaatgaactttctcatgcattaagccagttcgattatgtgctgtttgacatgggagcaggcttatcaaaagatcaactgccttttattttatcagcagaagatattttgattattacaactcccgagccgacggccattatggacgcatacagcgctgtcaagcacttggttttgacagaaaataagctttcaatgaaggtggctgtcaatcggtgccgtgaccaaaaggaagggcttgacgcttttgcccgcctctcccgtacaattcatatgtttttggatgttcaggttcagtttgccggttccgtttctgacgatgtgatcgtgagcaaagcggttgtcgaacaggttccttttttcataaaaagccctcaggcaaaagccagccggtcagtccgtattttagcggacgccttgtttgaaagagaagaaacgagacacaaagaagacaaacagacatttattgagaaattatcttcttttttaatgaggagggcttaatttgattcgtgtgcttgtagttgatgattcagcttttatgagaaaaatgataagtgattttctgaccgaagaaaagcagatagaagtaatcggaactgcgagaaacggagaagaagcgcttaagaagattgaattattaaaaccggatgttattactcttgatgttgaaatgccggtcatgaatgggacagatacgctccgcaaaattattgagatttataacttgccggtcattatggtgtctagccagaccgagaaaggtaaagaatgcacaattaattgtttggagatcggtgcctttgactttatcacaaagccatcaggctcaatatctctggatctatacaaaattaaagaacaactagttgagcgtgtcgtcgcggcaggactttccggcaagcggaaacgtcctgtttcccagacagttcggcccgaacctattgtgcgtgctgtcgttaagcctgaattaagcaaaccgaaacctggcacgggcagacaaattgtgtgtatcggcacatcaacaggcggtccacgggcgttacaaaaggtgataccgaagctccctaaggatttgaacgcaccagtggttgtcgttcagcacatgcctgaagggtttactgcttctttggctgatcggctgaatcatttatctgacattcaggtaaaagaagcaaaagatggtgaagcagctcttaacggctgtgtttacatagcaccgggcggaaaaaacatatccgttattaaaaacagcgaaggactccaggttgtgcttgataaccatgacacaccaagccgtcataaaccatctgctgattatttattccgttctgtcgggaaactgacagattatgaaaaagtagcggttatcatgaccggaatgggcagtgacggcactgctggactaaaggacatgctaacagccggcaatgtgaaagccattgcggagtctgaagaatcttgtgtcgtatacgggatgccaaaagctgctgttaaagcgggtctcattcatgagattaaacatgtggaagatatcgcagcatccatcacaagctgtgtgaaaaaagagagggtgtgattcaaatggatatgaatcagtatttagatgtctttattgatgagagtaaagaacatttacaaacatgtaatgaaaagcttcttcttttagagaaagacccgactgatcttcagctcgtacatgatatattcagggctgcccatacattaaaaggaatgagcgcaacgatgggctacacggatttagcacatcttacccatctgcttgaaaacgtgctggatgcaatccgaaacggagacatggaagtcacctcagactggctggatattttgtttgaagctctggatcacctggaaacaatggttcagtctattattgatggcggggatggtaaaagagatatctcagaagtgagtgccaagcttgatgtgaatggtgcgcacgctgaatccgctgcctccgctgaacctgcagaagcacagagttcagcatctgattgggaatatgatgaatttgaacgcacagttatacaagaagcggaggagcaaggcttcaaacgatatgaaatcaagatttctctgaacgaaaactgtatgttaaaagcagttcgtgtctatatggtgtttgaaaaactaaatgaagtcggagaagtagccaaaacaattccaagtgctgaagtgcttgaaacagaagattttggaactgactttcaagtttgtttcttaacacatcaatcagcggaagacattgaacaattaatcaatggcgtgtcggaaattgagcatgttgaagtcattcaaggggctcctttaacatcagctgaaaagcctgaagaatctaagcaagaagattcaccagcagcagctgtacctgcgaagcaggagaaacaaaaacagcctgctaaaaacgatgaacaggcgaagcattcagccggcggatctaaaacaattcgtgtcaacattgacaggcttgattctttaatgaacttatttgaagagcttgtcattgaccgcgggcgtctcgagcagattgcgaaagagcttgagcataatgaactgactgaaacggttgaacgaatgacgagaatttccggagatttgcaatcgattattctgaatatgagaatggtcccggttgaaactgtttttaacagattcccgagaatgattcgccagcttcagaaagagctgaataaaaaaattgaactctcgatcatcggtgcggaaactgaactggatcgtacagtaattgatgaaatcggagatccactcgttcacttgatcagaaacagtattgaccatggtatcgaggcgccggaaacacgtttgcaaaagggaaaaccggaatcaggaaaagttgtgcttaaagcttatcacagcggcaaccatgtctttatcgaagtagaggatgacggcgcaggccttaatcgaaaaaaaattctggaaaaagcgcttgagcgcggggtcataacggaaaaagaagctgaaaccttagaagacaaccaaatttacgaattgatttttgctccggggttctcaactgctgaccaaatttctgatatttccggccgcggtgtaggacttgacgttgtaaaaaacaaactggagtctcttggcggttcagtcagtgtgaaatcagccgagggtcaaggctctctattcagcatccagctgccgcttaccttgtctattatttcagttctgctgattaagttggaagaagagacatttgccattccgatttcttcaatcattgagacagcagttattgacagaaaagacattttgcaaacgcatgaccgtgaagtgattgactttagagggcatattgtccctgtcgtttatttaaaagaagagtttaaaatagaagatacaagaaaagatgcggaacagctccatatcattgtcgtgaaaaaaggcgacaaacctactgcatttgtggtggactcctttattggccagcaggaagttgtgctgaaatcactcggagattatttaacaaacgtctttgcaatttccggagctactattttaggagacggagaagtagcgctcattattgattgtaatgcactgattatttaaccattcgaggaggtgtctcacatgactgcagaaattaaaacaggcgaaaaaatgatagtctttatggtaaatggcaaagaatatgccatttccgtcactcaggtgaaatcaattgaaaaatggcaaaagccaacgagggtacctggcgtcgaaccatatatttgcggggtaatcaatttacgcggggtggtgactccggttattgatttaagaaaacgcctgaatttgccagagtatgaaattacagatgaaacacgaattatcattattgcttatcgtgatattgaagtcggctggattgtggatgaagcgaatgatgtgattaccgtacacgaaagtgaaatagaatctgctccagaaggcgttcagaaagatacggatgtgtcgatcgaacagattgtgaaacaagagaacagactcttaaatattattgatgcgaacgcggttttggataaagaatcatctcagtccgctgtgcccgatcaagcttaatcttaaaggggttatgacatgagtatttttaatggaatcaaagaagagcagatggacattttgcgggaagtcggcaatataggcgccggccactccgcctctgcaatggcccagctgttaaatagaaagatagatatggaagtcccatttgcaaagctgctgtcttttgatgagcttgttgattttttcggcggcgccgatgtcccggttgccagcatctttttaagaatggaaggcgatttaacgggttcaatgttctttataatgcctttttttcaggcggagcagtttatcagagagctgattggaaaccccgattttgacatagaggacttaggtgaagaccacatgagctcatccgctttgcatgaactgggcaatattttagcggggtcatatttaacagctttggcggatttgacgaaactccagctctatccaagtgttcctgaagtctcattggacatgttcggagctgtgatcagcgaagggctgatggagctcagtcaggttggagaacacgccattgttgtcgacacgtcaatttttgaccaaagccatcagcaggagctgaaagcgcatatgtttatgctgccggactatgattcatttgaaaagctctttgtcgccttaggtgcatcattatgagtacaactgaggctgttgttataaaggttgggattgctgacgtgaagatcgcccgcttcccggataccatccggacctctggtttgggctcatgtgtggggctggtgctttatgataaagaaaagcaaacggcgggtcttgttcatgtcatgcttccggattcgacgttatcgaaaactgccgagctcaaccgggctaagtacgctgacaccgccgtacagaccacgattgatatgctgatagaagcgggatgccggaaatttgcattaaaagcaaagctggccggcggatcagagatgtttaaatttaaatcgacaaatgatttgatgaagatcggaccgagaaatgtattagcgataaaagaacagctgtctttatttaatattcctattattagtgaagatacgggcggctcaagcggccggacgatagaatttgaaccgaagtcctgcatgctgcatattcgaactgttaaacaaggtgaaaaaacgatttaattaaggtattagggggataacaatgcaatccttgaattatgaagatcaggtgctttggacgcgctggaaagagtggaaagatcctaaagccggtgacgacttaatgcgccgttacatgccgcttgtcacatatcatgtaggcagaatttctgtcggactgccgaaatcagtgcataaagacgatcttatgagccttggtatgcttggtttatatgatgcccttgaaaaatttgaccccagccgggacttaaaatttgatacctacgcctcgtttagaattcgcggcgcaatcatagacgggcttcgtaaagaagattggctgcccagaacctcgcgcgaaaaaacaaaaaaggttgaagcagcaattgaaaagcttgaacagcggtatcttcggaatgtatcgcccgcggaaattgcagaggaactcggaatgacggtacaggatgtcgtgtcaacaatgaatgaaggtttttttgcaaatctgctgtcaattgatgaaaagctccatgatcaagatgacggggaaaacattcaagtcatgatcagagatgacaaaaatgttccgcctgaagaaaagattatgaaggatgaactgattgcacagcttgcggaaaaaattcacgaactctctgaaaaagaacagctggttgtcagtttgttctacaaagaggagttgacactgacagaaatcggacaagtattaaatctttctacgtcccgcatatctcagatccattcaaaggcattatttaaattaaagaatctgctggaaaaagtgatacaataatgaatttcatggttagcgagtgaaaaacatgtcaacactattatggcttttaagctttatgctccacggcgttcttctgtacgctgtcattatcctgtatacgaggctcgctgcagtgaaagaaacagaaaaacagcaaaaacagatacttgaagagacggaaaacaccttggcggcatttctgcttgaattaaaagaagaaaatgagaaactgatagaaaataaagcttcatctgcaagtcaatcagatgaagaatcccaaaagtcaggccttcagacctctgaaacatatcaagagcgggatccagtccaagaggcagagaatcttcctgaacatattgaaggtctgattacagaggttgaccgtcgggaagagctcgtaaacagtgaggtccaatcatttgaagaccaggtcatagaattatatgaacagggatattcggcaagtcaaattgcccagaaaatgaagagcggaaagacagaaatcgagctatttttaaaatttcgctccaaaggtgtaaaggattcttgattgtcggataaagctgtgttatattatgtcttggtgttaaatacacacgcttaacgatttatgcagagggtgctgcaggcggcagttctgtacaaaaatgacctaagcggaggaaaaaaaccattatattaggaggaaataacatgtcagtcatttctatgaagcaattgcttgaagctggtgttcacttcggtcaccaaacacgccgttggaacccaaaaatgaagcgttacattttcacggagcgtaacggaatctacatcattgaccttcaaaaaacagtcaaaaaagtagaggaagcttacaacttcactaaaaatcttgctgctgaaggcggaaaaatccttttcgtcggaacaaaaaaacaagctcaagattctgttaaagaagaagctcaacgctctggcatgtactatgtcaaccaacgctggttgggcggtacattaacaaacttcgaaacaatccaaaaacgtattaaacgtcttaaagacattgaaaaaatgcaagaaaacggtacgtttgatgtacttcctaaaaaagaagtcgttcaattgaaaaaagaattagagcgtcttgaaaaattcctaggcggaattaaagatatgaaggatcttcctgatgcattattcatcatcgatcctcgcaaagagcgcatcgctgttgcggaagctcgcaaattaaacatccctatcatcggtatcgtagatactaactgtgatccagatgaaatcgatgttgttatcccagcgaacgatgacgctatccgcgctgttaaacttctaacttctaaaatggcagatgcaatcttagaagcgaagcaaggcgaagaagaagcggaagttgctgaagaaactgcaccagaaacagaaacaacaactgcgtaacctattcaaaaggtgataagagggactgccttttatcaccttttttcaagaaaaatgtgtaatatacatactcttgtttaaacatataaggaggaatacaaatggcaattactgcacagcaagtaaaagaactgcgtgaaaaaactggcgcgggcatgatggattgtaaaaaagcgttaactgaaactgacggagatatggacaaagcaattgaccttttaagagaaaaaggaattgcaaaagcagcgaaaaaagctgaccgtatcgcagcagaaggttctactcttattaaaactgacggcaacaaaggcgttatcctagaagtaaactctgaaactgatttcgttgcgaaaaacgaaggttttaaagagcttcttaacactttagctgaccaccttcttgcaaacacgccagctgatgttgaagaagcaatgggccaaaaaatggaaaatggctcaactgttgaagagtacatcacaagcgcagttgctaaaatcggtgagaaaatcactcttcgccgctttacagttcttacaaaagacgacagctctgcattcggtgcgtaccttcacatgggcggccgcatcggtgtattaactgttctcaacggtacaactgatgaagaaactgcgaaagatatcgcaatgcacgttgctgcagttaaccctcgttacatttctcgtgatcaagtatctgaagaagaaacaaatcatgagcgtcaaatcttaactcagcaagccctccaagaaggcaaacctgaaaacatcgtagcgaaaatggttgaaggccgtctgaacaaattcttcgaagaaatttgtctattagaccaagcgttcgttaaaaacccagatgaaaaagtgaaacaagttattgcagcgaaaaacgctactgttcaaacttttgtccgctatgaagttggagaaggcatcgaaaaacgtcaagaaaactttgctgaagaagtaatgaaccaagtgaaaaaataatggtgaaaagatttcgcggctaagtcgcgtcttttcaggcagtataggggacacattttgtgttccctatttttaaaactatatttacaaacctttttttctcttgcataatagaaaacggcaatgtttacacttggaggttatcatggaaaaaccaaaatacaaacgtatcgtattaaagcttagcggggaagcattggcaggagaacagggaaatggaattaacccgactgtcattcaatccattgcaaagcaagtgaaggaaatcgctgagcttgaagtcgaagtggctgttgttgtaggcggcggcaacttatggcgcggaaaaacaggaagtgacctgggcatggaccgcgcgactgctgactatatgggaatgctggcgacagtaatgaattcgcttgctcttcaagacagcttggaaacactcggaatccagtccagagtgcaaacatccattgaaatgagacaagttgctgaaccgtacataagaagaaaagcgatacgccacttagagaaaaaacgtgtcgttattttcgctgcgggcacaggaaacccatatttctcaactgatacgacagctgcactgcgggctgctgaaattgaggcagacgttattttaatggctaaaaataacgttgacggtgtgtataatgctgatcctagaaaagatgaatcagctgttaagtatgaatcactttcttatcttgacgttcttaaagacggcctggaagtcatggattcaacagcttcctctttatgcatggacaatgacattccgcttatcgtcttttctattatggaagaaggaaatatcaaacgtgccgttatcggtgaatcaatcggaacgatcgtgagggggaaataacgtgtcaaaagaagtattaactcaaacaaaagaaaaaatggaaaaagcaattgctgcttatcagcgcgaattggctactgtacgcgcaggccgtgcaaatccatcattattagataaagtaacggttgaatattacggagcgcagacacctttaaatcagttgtcttctattaacgtgcctgaagctcgtatgctcgttatcacgccatacgataaaacagcaatcggtgatatcgaaaaagcgattttaaaagctgatttaggtcttacaccaacaagtgacggcaatatgattcgaattgcaattccggcactaacagaagagagacggaaagaattagtgaaagttgtaaaaaaatatgctgaagaagcaaaagtagctgttcgtaacgttcgccgtgatgctaacgatgatctcaaaaaacttgagaaaaacggagacattactgaggatgaactgcgtgcttccactgaagacgttcaaaaactgacagatgaatatgtgtcaaaaattgacagtgtcacaaaagacaaagaaaaagaaatcatggaagtttaatgaaaaactatgtacaatagataatagtgaaaagaccctctcatgtttacagggggtttttttgttaatactgttgattacattgattatcagcagggaatgtaacctttttgggtgacggaggaatctcatgctcaacatactcaaaaattggaagaatcagcaaactgcggcttccaacttagaacgttatacaaaagaagacatacttaagggagaaattcccgaacacatcgccattatcatggatggaaatggccgttgggctaaaaaacgctctcttcccagaattgcaggccaccatgaagggatgaaggtggtaaaaaggaccacgaagctcgcaaacgaattaggtgtcaaagtactgacattgtatgcattttcaacagaaaactggaaaagaccgaaaatggaggtcgattttttaatgaagcttccggaagaatttttgaatacgtatcttccagagcttgttgaggaaaatgtacaggttcggatcattggggatgaaacggctttgccggcgcacacattacgtgcgattgaaaaagctgtacaggacacggcgcaaaacgacggaatgatccttaattttgctcttaactatggaggccgtactgaaattgtcagtgctgcaaaatcactcgcggaaaaagtgaaggaaggctctttgaatattgaagacattgatgaatcgcttttttctacttatttgatgactgaatctttgcaggatcctgaacttttaattcgaacgagcggcgagataaggctgagtaattttatgctatggcaggttgcctacagtgaatttgtctttactgacgtcttgtggcctgactttaaagaagatcacttcttgcaggcgttaggagagtttcagcagagaggccggaggtttggcggaatttagaggatggtggacatgaaacaaagaattttgacaggtgttctggcagcaattgtatttttatttttggttattgtcgggaaattgccgttcaccatattaatttatgctatgggcagtgtggcgctttttgaacttttacggatgaaaaagctgaagctggtttcactgccgggtttgatcggtcttttattattgtggatgttcttattaccaagccagtattcgttttttgaagcggacgggatttccaaaatggaaatcgctttatttgcggtactgctattgctgacttacacagtgttggtcaagaacacctttacttttgatgaagtcgggtttattacgcttgcagcaatttacatcggaatgtgttttcattattttatcgaaatcagaaatcttgaccaatacggattaacatacattttttatgcgtgtgttgtcatttggtccaccgattccggtgcctattttgtcggtaaatcgcttgggaagcggaaactgtggcctgaaatcagtccgaataaaacagtggaagggtttgcaggcggaattgtcatcgcacttgtattggcgacgatttttcagcttgttgcacaacttccgatcccgtatatctatctgctgttgatcacgctgtttttgtctgtttttggacaactgggagatttagtggaatccgccttgaaaagacattacgatgtaaaggattctgggaatattcttcccgggcatggcggtatattagaccgttttgacagtttcttgtttgtcatgcctttcttgtactttctgcttgcccttttttcataaaaaagtctaatatgaatatgagactgatcatgcagcaataagaataggagtagtggcaactttgaaaaatatttgtcttttaggagcaacaggatcaatcggcgaacagactcttgatgtactgcgtgcacatcaagaccaatttcagctggtatctatgtcgtttggcagaaatattgataaggccgttccaatgattgaggtctttcagccgaagtttgtctctgtcggtgatctggatacatatcataaattaaaacaaatgtctttttcttttgaatgccaaatcgggctgggagaagaaggactgatagaagcagcagtgatggaggaggttgacattgttgtcaacgctttgcttggaagcgtcggtcttatcccgacattaaaggcaattgaacagaaaaaaacaattgcgcttgcaaataaggaaactcttgtcactgcagggcatatagtaaaagaacatgctaagaaatatgatgttccgctgctgcctgttgacagtgagcattcagccatttttcaagctcttcaaggcgaacaggctaaaaacattgaacgcctcatcattacggcatccggcggaagttttcgggacaagacgcgggaggagctcgaatcagtaacggttgaagatgcattaaaacatccaaactggtcaatgggtgcaaaaattacaattgattcggctacaatgatgaataagggattagaggtgatcgaggcacactggcttttcgatataccttatgaacaaattgatgtggttttacataaggagagcatcatccattcaatggttgagttccatgataaaagtgtgatcgcacagctcggaactccggatatgagagtccccattcaatatgcgctcacttatcctgaccgattgccattaccagatgcgaaaaggcttgaattatgggaaatcggcagccttcattttgagaaagctgattttgacaggttccgatgcttacaatttgcttttgaatcaggtaaaataggaggaacaatgccgacagtgctaaatgcggcaaacgaagtagctgtcgctgcctttttagctggcaagataccgtttttggctattgaagactgtatcgaaaaggcactaacccgccatcaattactgaaaaaaccgagcctggcggacattcaagaagtggacaaagatacccggggatacgtcaattcaatactcacataaggtggtatgttcgtgaatacagttatagcgtttatcattattttcggaacgctcgttttcttccatgaactgggccatttattgctagcccaaagagcgggaattctctgccgtgaatttgcgatcggcttcggtccaaagattttttctttcaaaaaaaatgaaacagtttatacgatcaggctgcttccggtcggcggatttgttcgtatggccggcgaagatccggaaatgattgaggtgaaacccggatacacggtcgggcttctgtttaataaggaagatcaagttgagaaagtcatcatcaatcaaaaggaaaaatatccggatgctttagtcattgaagtggaaacagcggatctagagcatgacatgaagatcaccggttatgaacaggggaaagaggacgaactttccagctttactgtcagcgaaacatccttttttattgtagacggagaagaagtgcagattgcgccgtataatcgccaatttggttccaaacctgtatggcagcggattaaagcaattgctgcagggccgattatgaactttattttagcttacgtcattttagtgatgcttgggctgattcaaggcgtaccgtcaaatgaacctatgctcgggcagctgacagacaatggacgggcggctgaagcagggctaaaagaaggggattatatccaaagcattaacggagagaaaatgaggtcttggactgacattgtctccgctgtaaaagaaaacccggagaaagaaatggacgttgcagtaaaaagagataacaaaacgcttcatatttcggtgactccggaagctgttaaagatgagaacaaaaaaacaatcggacgtttcggttcctatgcgccgactgaaaaaggcgtactctcagcggttgcttacggcgcgacatcaacagttgatgtcaccaaagccattttaaccaatctgagcaaattagtaacaggccaatttaaactcgatatgctgtcaggtcctgtcggcatatatgacatgacagaccaagtggcgaaaacagggatcgtgaacttatttcagtttgcggcgtttttaagcattaaccttgggattgtcaacctgcttccgattccggcacttgacggaggaagactgttgtttctatttattgaagcgattcggggcaaaccgattaacagggaaaaagaagcatttgttgtgtttatcggagtagctttcttaatgcttcttatgctggttgtcacatggaacgatatccagcggctgtttttgtaaacgaaaagtaaatcaatcagaggtgcgaagaaatgagacaaagcttgacgcttattcctacgctccgtgaagttccagctgatgccgaagcaaaaagtcatcagcttcttctgagagcaggatttatcagacagaatacgagcggggtatacagctatatgcctcttgcgtataaggtgattcaaaacattcagcagattgttcgagaggaaatggagaaaattgatgccgtagaaatgctcatgcccgcattgcagcaggcagagacatggcaggaatcaggcagatggtatacgtatggtcccgaactgatgagactaaaagaccgtcatggccgtgaatttgctttaggggcaacgcatgaagaggttatcacttcgcttgttcgcgatgaggttaaatcttataagcgtctccctctgactctttatcaaattcagtctaagttcagagatgaaaaacgtcctcgcttcggtttgttaagaggccgcgaatttattatgaaggatgcgtactctttccatgcatctgcagagagcctggatgaaacgtatcaaaaaatgtacgaggcctattctaatatttttgcccgctgcggcattaatgtaagacctgttatcgctgattcaggcgcaatgggaggaaaggatacgcacgaatttatggcactttctgcgatcggagaggatacgattgcgtattctgatgaatcacagtacgcggctaatatcgagatggctgaagttcttcaccaggaagttccttcagatgaagagcctaaagctctagagaaggttcatacgcctaacgtgaaaacaatcgaagaactgactgcgttcttacaggtttcggctgaagcgtgcattaagtcagtattgtttaaagctgatgaccgttttgtcttagtgcttgtaagaggggatcatgaagttaacgatattaaagtgaaaaacttgcttcatgcagaagttgtagagcttgctacacatgaagaggtcattcagcagctcggaacagagccaggctttgtaggccctgtcggtattcatcaggatgtggaagtatatgccgatcaagctgtgaaagcaatggttaatgctgttgccggggcaaatgaaggagatcatcattataaaaatgtcaatgtgaatcgtgacgcgcaaattaaagaatttgctgatcttcgttttattaaagaaggtgatccttcaccagacggcaagggaacgatccgttttgctgagggaatcgaagtcggacaagtctttaagctcggaacacgctattcagaagcgatgaatgcgacatatttagatgaaaacggacgcgcgcagccaatgctgatgggctgttacggaatcggtgtgtcaagaacgctttctgctattgctgaacagcatcacgacgaaaaaggcttaatatggccaaaaagcgttgcgccgtacgatcttcatattcttgctttgaacatgaaaaacgatgggcaaagagagcttgctgaaaagctgtatgccgatttaaaagcggaaggctatgaagtgctctatgatgaccgtgctgagcgtgccggcgtaaaattcgctgattcagatttaatcggccttccaatccgcatcactgtcggaaaacgagctgacgaaggaatcgtcgaagtgaaaattcgtcaaactggtgagtcaactgagatttcagtagacgaattatctgcgtttatcagcaagcagtaatcaccataacgatttatcaaaaaacatgttaaaatagaaataatagaaggtacctcattgcctgaggtaccttcacttatgatgtttttagggagggatactgtcttaatggaacagttatcagtaaacagaaggcagtttcaaattcttctgcagcagattaatatgacagatgataccttcatgacatactttgaacatggcgagattaaaaagctgacaattcacaaagcttctaagtcttggcattttcattttcaatttaaatctttgctgccttttcaaatatatgacacattaacaacgaggctgacgcaatcgtttgcccacatagcaaaagtgacatcttcaattgaagttcaggatgccgaggtcagtgaaagtatcgttcaagactactggtcacgctgcattgaagaactgcagggcatttcgccgccgattatcagtcttttaaaccagcaaaaaccgaagctgaagggcaataaactgattgtcaaaaccaaaacagatacagaagcggctgcgctaaagaacaaatacagttccatgattcaagcagaataccgtcaatttggctttccggatcttcagcttgatgctgaaatatttgtatccgagcaagaagttcaaaagtttcgggagcaaaagcttgcggaagaccaagagcgggctatgcaggccttgattgaaatggagaagaaagataaagaaagtgatgaagaccaagcaccatctggtcctcttgttatcggttatcaaattaaagataacgaggaaatccgaacacttgacagcatcatggacgaagaacggagaattacggtccaaggttatgtgtttgatgtggagacgcgcgagctgaagagcgggcgcacgctgtgtatcttcaaaattacagactatacaaatagtattttgatcaaaatgtttgcacgtgaaaaagaagatgcggcgctgatgaagtctctgaaaaaaggaatgtgggtaaaagcacgcggaagcattcaaaatgatacatttgtcagagaccttgtcatgatcgcaaatgacgtaaacgaaataaaagcaaaaacccgtgaagattcagcacctgaaggagaaaaaagagtggaattgcatcttcattccccaatgagccaaatggatgctgttacgggtatcggaaagcttgtcgaacaggcgaaaaaatgggggcatgaggccatcgctttgaccgaccatgctgtcgttcaatccttccctgatgcgtattctgcggccaaaaagcatggaattaaaatgatttacgggatggaagcgaatctcgtggatgatggcgtgccaattgcttataatgccgcacatcgtctgctcgaagaagaaacatatgttgtttttgacgttgagacgacaggattgtctgctgtatacgataccattattgagctggctgcagtaaaagtaaaaggcggagaaattattgataaatttgaggcgtttgcgaacccgcatcgtccgctttccgccacaatcatagagctgacagggatcacagatgatatgctacaagacgctccggatgtcgtagatgtaataagagatttcagagaatggattggcgatgatattcttgtcgctcataatgcaagctttgatatgggattcttaaatgtagcctataaaaaacttcttgaagtcgaaaaagctaaaaacccagtcattgatacgcttgaacttggacgttttctctatccggaatttaagaaccaccggttgaacacactttgtaaaaagtttgatatcgagctcacacagcatcaccgtgcgatctatgatactgaggcaaccgcttatttgcttctgaaaatgctgaaagacgcagctgaaaaaggtattcagtaccatgatgagttgaatgaaaatatgggtcagtccaatgcttatcaaagatcaagaccgtatcatgcaacattacttgccgtgaacagcacgggacttaaaaatttatttaagcttgtgtcactttctcatattcattatttttacagagtgccgcgtattccgagatctcagcttgagaaatacagggaagggcttctgatcggttctgcttgtgacaggggagaggtttttgagggaatgatgcaaaaatcgcctgaagaggtggaagatatcgcgtcattctatgattaccttgaggttcagccgcctgaagtgtatcgtcacttgctggagcttgaactggtccgtgatgaaaaagcgctgaaagaaattattgcgaatatcacgaagctgggggaaaagcttaataaaccggttgttgctacgggaaatgttcattacttgaatgatgaggataaaatctacagaaagattttaatatcctcacaaggcggggcaaatccgctgaataggcatgaactgccgaaagtgcatttcagaacgacagacgaaatgcttgaagctttttctttcttaggtgaagaaaaagcgaaggagatcgtagtcaccaatacccaaaaggttgcttctttagttgatgacatcaagccgattaaagatgatttatatacgccgaaaatcgaaggcgctgatgaagagatcagagaaatgagctatcagcgtgcaagaagcatttacggggaagagctgcctgaaattgtcgaagcgcggattgaaaaagagttaaagagtattattggccacggatttgctgttatttacttgatctctcacaaacttgtaaaacgttcactagatgacgggtatctcgttggttcccgtggttccgtaggatcttcattagttgcgacacttactgagattactgaggtaaacccgctgccgccgcactatgtttgtcctgagtgccagcattctgagttctttaatgacggttctgtcggttctggttttgacctgcctgacaagacatgccctcattgcggaacgcctttgaaaaaagacggccatgatattccatttgaaacgttcttaggatttaaaggggacaaagtacctgatatcgatttgaacttctcaggggaatatcagccgcaagcacacaattacacaaaagtattgttcggagaagacaatgtatatcgtgcgggaacaataggcacggtggcagaaaaaacagcctacggttatgtaaaaggctatgccggagacaacaatcttcatatgcgcggtgccgaaatagatcggctcgtacagggatgcacaggtgtaaaacgtacaactggacagcaccctggcggtattatcgtagttccggattatatggatatttatgatttttcaccgatccagttcccggcagatgccacaggttcagagtggaaaacgactcattttgatttccactccatccatgacaacctgttaaaacttgatattctcggacacgatgacccgactgttattcggatgcttcaagacttaagcggaatagatccgaaaacaattccgacggatgatcctgaagtgatgaagatcttccagggaaccgaatcactcggtgtgactgaagaacagattggctgtaaaacgggcactcttggaattcctgaattcggaacccgatttgtccggcagatgcttgaagatacaaagccgaccactttttctgagctcgttcagatttcaggcttgtctcacggaactgatgtatggcttggcaatgcacaggagctcatccacaataatatttgtgagctgagtgaggttatcggctgccgtgatgacattatggtttatttaatctatcaaggccttgagccgtcccttgcctttaaaatcatggaattcgtgcgtaaaggaaaaggattaacgcctgaatgggaagaagaaatgaaaaataacaatgtcccagactggtatattgattcctgtaaaaagattaaatacatgttcccgaaagcccacgccgcggcatatgtcttaatggcagtccgcattgcttactttaaagtgcatcatgctcttttgtattatgcggcttattttaccgttcgtgcagatgactttgatattgatacaatgatcaagggctctacagcaatcagagcggtaatggaggatataaacgctaaaggacttgatgcttcaccgaaggaaaagaaccttctgactgttttagaattagcgcttgagatgtgtgagagaggctattcattccaaaaagtcgatttatatcgctccagcgccacagagtttattattgacggcaacagtcttattccgccgtttaactctattccagggttagggacgaacgctgctttgaacattgtaaaagctcgcgaagaaggcgaattcctctcaaaagaagatttgcaaaagagagggaaagtatcaaaaacgattttagagtacttagatcgccatggctgtctggagtcactgcctgatcaaaaccaattgtcactgttctaatatggaaagcagaatttctcagaaattctgcttctatgcatacataagcgcaaaaagtgccatcgtaatattagagtttctgtcacttgcttaggtatgaaggtaagcgtatatccatttgcaataaaaatatggttatggtatagttttattggaaatgctaacgattaccgaggcaaagagtggggaaacccgctcttttgtattgaacaggagaattttgtctcgacatgttcatcgtttactttttagcccctgctcttttgaagcagggtttttatgcagagtgacgagacgaatatgagatcgacagcacaaggaggaagaacatgagcaaaaaagtgactgacaccgttcaagaaatggctcagccaatcgtagacagccttcagctggaactcgttgacattgaatttgtcaaagagggccaaagctggttccttcgcgtgtttattgattccgatgacggtgtggatattgaggaatgtgccaaagtaagcgaagctttaagcgaaaagcttgatgaggcagacccaatcagccaaaattactttcttgaagtctcatctccaggagctgagcgtccgctaaagaaaaaagccgatttcgaaaaatcactaggaaaaaacgtatacattaagacgtatgagcctattgacggcgtaaaagtgtttgaaggtgaactggctgaatttgatggacaaacagtgacagttgagatcacgatcaaaacaagaaagaaacggatcaatattccgtatgaaaagatagctaatgcaagattagctgttacattctaatgaatacaaatgttttaaggggggagaccgttaaatgagcagtgaattattagatgctctcacgattcttgaaaaagaaaaaggcatcagtaaagaaattatcatcgaagcaatcgaagctgcgttaatttctgcttataagcggaattttaatcaagcgcaaaatgtacgggtggatctaaaccgtgaaactggctccatccgtgtatttgcaagaaaagatgtcgttgacgaagtatacgaccagagattagaaatctcaattgaagaggcacagggcatccatccggaatatatggtcggcgatgtcgtcgaaatcgaagttacacctaaggatttcgggcgcatagctgctcaaacagcgaagcaggtcgtcacacagcgtgtgcgcgaagctgagcgcggtgtgatttattctgaatttatcgaccgtgaagaagacatcatgacagggatcgtccagcgtctggacaataaatttatctacgtgtctttaggcaaaatagaagccttgctgccggttaatgagcaaatgccgaatgaaagctacaagccccatgaccgcattaaggtatatatcacaaaagtagaaaaaacaacgaagggtccgcagatttatgtgtcaagaacacatccaggcctgttaaagcgtttgtttgaaattgaagtgcctgaaatttatgatggaactgtcgagctaaaatctgttgccagagaagccggcgaccgttcgaaaatttctgttcgcacagatgatcctgacgttgatcctgtcggttcatgcgtagggcctaaaggccagcgtgtgcaagcaatcgtcaatgaattaaaaggtgaaaaaattgacattgtcaactggtccagtgatcctgtagaatttgtcgcgaatgcgctcagcccttccaaagtgcttgatgtcattgttaatgaagaagaaaaagcgacaactgttattgttcctgattaccagctgtctctggcaattggaaaaagaggacaaaacgcacgcttagctgctaaactgacaggctggaagattgatattaagagcgaaacggacgcaagagaacttggaatctatccgagagaacttgaagaagatgatgagccgctctttacggagcctgaaactgctgaatcggatgaataagaggtgactttaggtgaataaacacaaaaagatcccattacgcaaatgtgtagtgactggtgaaatgaagcctaaaaaggaactgatccgagttgtacggtcgaaagaaggcgaaatctcagtagacccgaccggaaaaaagaatgggcggggtgcttatttaacgctggataaagagtgcatcttagcagcaaaaaagaaaaacactttgcaaaatcaatttcaatcacaaatcgatgaccagattttcgatgaattgctggaactggcggaaaaggtgaaaaaataaaatgtctggaatggaatggtttcccttgctgggtctggccaatcgagctcgtaaggtcgtgtcaggcgaagacttggtaataaaagaaatcaggaatgcgcgtgcaaagcttgtcctgcttacagaggatgcatcatctaacacagcaaaaaaagtaactgacaagtgcaattattataaagtcccttataaaaaagtcgagagtcgcgcggttcttggacgctctatcggtaaagaagcccgtgtcgttgtcgccgtcactgaccaaggttttgcgaataagctgatcagcttgctcgattaatatttttgggggtgaacgaatggctaaaatgagagtatacgaatatgcaaaagcgttaaatgtttcaagtaaggaaattttgaccgcactgaagaacatggatttagaagtgaataatcacatggccatgcttgaagaaaaggccattaaaaagctagatgccaaatataaaaaaggcggcgcagctgctaaatctcaaaagccagcagaaacgaacaaaaacaaacagccacaaggggttaatcagcaatcagctggaaatcaaccaaataaaattcgagacggaaagaagaatgacgtgcagaataatcaatttaacaaaaacaagaagaataacaacaacaaaaaaaataaacgcaacaacaacaataataaaaaccaacatcagcaaaagcctgtaaagccgaaaaaagagcttcctgagaaaattacattctctggcactttaacagttggcgcacttgctgaagagcttggcaaagagccttcagaactcattaaaaagctgatgcttcttggcgtaatggcaaccattaaccaagagcttgataaagacacaatcgaactcattgcatcagaatatggtgttgaaacagaagaggtcattgtgcttgaagaaacagagctggaaaaatacgaagagcctgataatgaagaggatcttgaaattcgtcctcctgtcgtgacaatcatgggccacgttgaccatgggaaaacaacgcttcttgacagcatccgtaaaacaaaggttgttgaaggggaagcaggcggaatcactcagcatatcggcgcttatcaaattgaagagaacggcaagaaaatcacgttcttggatacaccgggccacgccgcatttacaacaatgcgcgcacgcggtgcagaagtaactgatattacgattcttgtcgtagctgccgatgacggtgtcatgccgcaaacagttgaagcgattaaccatgcaaaagcagcagaggttccaatcatcgttgctgtgaataaaatagataaagaatccgcaaaccctgaccgtgtaatgcaagaactgacggaatacggacttgtccctgaagcttggggcggagaaaccatttttgtgccgctttccgctttaactggaaaaggcattgatgagctcgttgaaatgattttgcttgtcagtgaggtagaggaactgaaagcgaatccgaatcgtcaggcaaaaggaacggttattgaagctgaactcgataaaggcagagggtcagtcgcgacgttgctcgtacagactggaacactgcatgtcggtgatccgatcgtagtcggcaatacatttggccgtgtccgtgcaatggtcaacgacattggccgccgtgtgaaaactgccggcccgtcaactccggttgaaattaccggtttgaatgatgtccctcaagcgggagaccaattccttgtctttaaggatgaaaaaacagctcgttctgtcggtgaagcccgtgcttcgaaacagcttgaagagcagcgcagcgataaagcgaagctcagtcttgatgatttatttgagcaaattaagcaaggtgatgtaaaagacatcaacctcatcgtaaaagctgacgttcaaggatctgctgaagctttaacggctgcacttcaaaaaattgaagtagaaggcgttaaagtgaaaatcatccatacaggcgttggtgcgattactgaatcagacattatcttggcatctgcttccaatgcaattgttatcgggtttaatgtgagaccggacggaaatgctaagagtacggctgaagctgaaaatgtagatattcgacttcaccgtatcatttacaaagtaatcgacgagattgaagctgccatgaaaggtatgcttgatcctgaatatgaagaaaaagtaattggtcaagtagaagtacgccaaacattcaaagtatctaaaatcggtacaattgccggcggatatgttactgaaggaaccattacgcgcgacagcggcctccgtttaattcgtgacggcgtcgtcatctttgaaggcgaagtagatgttctgaaacgctttaaagacgatgtgaaagaagtttcacaaggctatgaatgtggtattacaattaagaaatacaatgacattcgtgaaggtgacatccttgaagcgtttgtcatgcaagaaattgaaagaacgtgatcggatttgcggagtgtgaatgcatcatttatgatgcaggatcgctaaaagaaaagcgtgccgttctgaagcggattttaaccagggttcaaaacaagttcaatgtttcgatttcggagattggctatcaggacacctggcaaagaaccagcttcggaatcgccgctgtttcttcctctcgcgttcaaacagaaaaagaactgcagcgcgtcctagcgtttatcgattcttttcctgaaattgaacggacgatcactaggacagagtggttttaacttagaggtgattgaattgagtatgagagcaaaccgtgtcggcgagcaaatgaaaaaagaactcggtgatattatcagccgcaagctgaaagacccgagaattggttttctgacagtaacggatgtacgtgtatcaggtgatttgcaaattgcaaaggtgtatatctcggttctcggtgacgagaaaaaacgggaagaagcgctgaaagggctggcaaaagcgaaaggatttatccgatccgaaatcggcagccgcatcagacttcgaaaaacgcctgaaattgaatttgagttcgatgaatcaatcgattacgggaatcggatcgaaacactgattcacgaattacattcagagaaaccatctgaataaaaaaagagaggataggcgtatatcgtctgtcctctttcttcgtttataagaaaaaaactcaaaagaaggagtgaaaggcaaatggttaacggagttctccttttacataaacctgttggcatgacatcgcacgactgtgtcatgaagatccgaaagctgttaaaaacaaaaaaagtaggacatacaggaacgctcgatccggaagtatcaggcgtgcttccgatttgtgtaggaagagcgacaaaaatagtcgaatacttaactgaaaaatctaaaacgtatgatgcagaaataacattgggcttttcaaccacaacagaggatcaaaccggagaaacggtggaaacaaagcctgtcaatcacgacattgataaagcggatgtagaaaaggttttaaacagtttaaaggggaaacaagaacaaattccgcccatgtattccgctgtaaaagtaaacggcaaaaaattatacgaatacgcaagagcagggattgaagtagaacgtccgaaacgtatgataaccattgaagacattgccctgacaacagagattaaacatcatggagaaaccgcaagcttccggtttacagtgacttgctccaaagggacctatgtaaggacgctggcggtcatgatcggagaaaagctcggatatccggcccatatgtctcatttaatccgtacggcatccggagatttttctctcgacgaatgctttacttttgatgaactcgaagcacaggcccaatccggaaccgtggaagagcatacagttcctattgaacgtgcgctcaatcatttgccgaaatggatcataagtgatacattagctaagaaagtagaaaatggggctttgcttgagacgcccgagcagttttctgaaatgacaagtggagaccgtattgccgtctttactgaatccggaacctgcttggcgatctatttccctcatcctgcaaaaaaagggctgttaaagccggcaaaagtattgatgcaaaaaagcgaacaatagaaaaaaggtgaccgttctgtgaagacgatacatattacacatcctcatcatttaataaaagaggagcaggcaaaatcagtgatggcgttaggttattttgacggcgttcatctcgggcatcaaaaggtaatcggcacagcgaagcaaatagccgaagaaaaaggtctgacattagctgtgatgacctttcatccccatccttctcacgtgttgggcagagataaggaaccaaaggatctgattacgcctcttgaagacaaaataaaccaaattgaacaattaggcacagaagttctgtatgtcgttaaatttaatgaagtgtttgcttctctttctcctaagcagtttatagaccagtatattatcggccttaatgtgcagcacgcagtggcaggctttgactttacgtacggcaaatacggcaagggaacaatgaagaccatgccggatgatttagacggaaaagctgggtgcacaatggtagaaaaattaacggagcaggataaaaaaatcagttcttcgtatatccgtaccgcgcttcaaaacggagatgttgaattggcgaatgtcttgcttggacaaccttattttattaaaggaattgtcattcatggtgataaaagagggcggaccatcgggtttccgacagcgaatgtcggtttaaataacagctatatcgttccgcccacaggtgtatatgccgtaaaagcggaagtgaacggcgaagtttacaatggcgtttgcaatattggctataagccaacgttttatgaaaagcgccctgaacagccttccatcgaggtcaatctgtttgatttcaatcaagaggtatatggagccgctataaaaatcgaatggtacaaacggattcggagcgagcggaaattcaatggcatcaaagaattaactgagcaaattgagaaagataagcaggaagccatccgttatttcagcaatttgcggaaataacttgcaacgcacgcaaattttattctaaaatatttgcatataggcacgatttttagtatgatagttttcgtagtcttaaaaccattgcttggcaatccgaagtcaccgacggttgctaggtaactggggctaaatatgatttggaggtgaaacaggatggcaattactcaagagcgtaaaaaccaactcatcaatgagttcaaaacacacgaatctgatactggatctccagaagttcagatcgctatcctaactgactcaattaacaacttgaacgagcatttacgtactcacaagaaagaccaccactcacgtcgcggtcttcttaaaatggtaggtaagcgtcgtaatcttcttacgtatctgcgtaataaagacgtaactcgttaccgtgagttaattaacaaactaggcttacgtcgataatcgtaaaaagcgggaggattcccgcttttttatcgtattaaagcgaaatttcttataacaaatcattgaaatccttttacatactactttgacattgatatgttcaattcatttcgttcataataggagtaattgattatttcacacaacgaagagaggagttcgtaattgtatgggacaagaaaaacatgtctttaccatagattgggccggaagaacgcttaccgttgaaaccggccagcttgccaaacaggcaaatggtgctgtgatgatccgctacggtgatacagcagtacttagtacagcaaccgcttcaaaagaacctaaaccgcttgatttcttccctcttactgtaaactatgaagaaagattatatgcggtagggaaaattccgggcggatttattaaaagagaaggacgtccaagtgaaaaagcggttcttgccagccgtttaattgaccgtccgatccgtcctttgtttgccgatggattccgtaatgaagttcaagtcatcagcattgtcatgagtgttgaccaaaactgctcttcagaaatggctgccatgttcggttcatctcttgcactttctgtatcggatattccgtttgaaggaccgattgcaggggttactgtcggacgcattgatgatcaatttatcattaacccgacagtcgatcagcttgaaaaaagcgatatcaatcttgtcgttgccggcacgaaagatgcgattaacatggtagaagcgggagcggacgaagttcctgaggaaatcatgcttgaggccattatgttcggccatgaagagattaaacgcctgattgcattccaagaagaaattgttgcagcagtcggcaaagagaaatctgaaattaagctctttgaaattgatgaagagcttaatgaaaaagtaaaagctttggcagaagaggatctgctgaaagccatccaagttcatgaaaagcatgcccgtgaagatgccattaacgaagtgaagaacgcagttgtggcaaaattcgaggatgaagaacatgatgaagacacaatcaagcaagtgaagcagattttatccaagcttgtgaaaaatgaagttcgccgcctgattactgaagagaaagtaagaccggacggccgcggtgtcgatcaaatccgtccgctctcttcagaggttggcctcttgccaagaacgcacggttcaggtctatttacaaggggacaaactcaggccctcagcgtatgtacgctaggtgctctgggagatgtgcaaatccttgacggcttaggtgtcgaagagtcgaaacggtttatgcatcattacaacttcccgcaattcagcgttggggaaacaggaccgatgcgcggaccgggacgtcgtgaaatcggacacggagcactgggtgagcgtgcgcttgagccagttattccgtctgaaaaagacttcccttatactgtccgtcttgtttcagaagtgcttgaatcaaacggttctacatctcaagcaagcatttgcgcaagcacacttgcaatgatggatgccggtgtaccgattaaagcgccagttgctggtattgcgatgggtcttgtcaaatcaggcgaacattacactgtcttgactgacatccaaggcatggaagacgcgctcggagatatggactttaaagtagcgggaactgaaaaaggcgtaacggccctgcaaatggacattaaaattgaaggcctttccagagagattcttgaagaagcgcttcagcaggcgaaaaagggcagaatggaaatcctcaacagcatgcttgcaacattaagcgaatcaagaaaagagctttctcgatatgcgcctaagatcttaacaatgaccattaatcctgataaaatccgcgatgtcatcggaccaagcgggaaacaaatcaataagatcatcgaagaaaccggtgttaaaattgatattgagcaggacggcacaatctttatttcctctacagatgaaagcggcaaccaaaaagcgaaaaaaatcatcgaagaccttgtgagagaggttgaagtcggccaactttacctaggtaaagtgaaacggattgaaaaattcggggctttcgttgaaattttcagcggaaaagacggtttggtgcacatttcagagcttgcgcttgaacgcgtagggaaagttgaagatgttgtgaaaatcggagacgagattcttgtcaaagtcactgaaattgataaacaaggacgagtgaatttatcccgcaaagcggtgctccgtgaagagaaagaaaaagaagaacaacaatcttaaatgaaaacataaaaggagcctgggagacccggcttctttattttgaagcttttcaaaagcaggcgggttctaccttgtccttctccttcataatgtgaggtgaggggggacagaacatgtacaaaaaatttgtaccgtttgccgtttttttatttcttttttttgtctcatttgagatgatggaaaatccgcatgcacttgattatataggggcaatgaaaaaagatacggtgactgtcacggcgtcaaaagacccgttatatgaagaattgcttcaaaaagcgccggagtacgaagttaagccccagaatgcaagaattgataaagtgtggaaaagcattccaggctacaatggattaaaggtcaatattgaacaatcatataaaaaaatgaaacagcatggtaagtttcgggaaaaagatttggtgtacagtcaagtaaaaccaagtgttcatcttgagtcacttcagcctgagcctatttataaaggaaatcctgacaaaccgatggtggcttttttaatcaatgtggcatggggaaatgagtatttggaaaaaatgcttcctattctgcaaaagcaccaggttaaagctacgttctttttagaaggcaattgggtgagaaacaatgtacagctcgctaagaagattgcaaaagacggacatgaaatcggaaatcattcatacaatcatccggatatgagcaaactgactacaggaagaatttccgagcagctcgacaagactaatgaacaaatagaacaaacgatcggcgttaagccaaagtggttcgctccgccaagcggaagtttcagaaaagcggttatcgacattgcagcagagaaacagatgggaacagtcatgtggacagttgatacaatcgattggcaaaagccggctccgtctgtacttcagacgagagtgttaagcaagatacataatggtgccatgattttaatgcatccgactgaccctacggcggaaagtcttgaagcgctgattacacagataaaagacaaaggatatgcgcttggaacagtcactgaactaatggatgaaacaagactattgaagtaacagatgaaggcagcttgtctttgaataggaggaacaaatttgattaaacgatatacgtgtcaaaatggtgtaagaattgtgctggaaaataacccgacagtccgttctgttgcgatcggcgtatggatcggcacaggttcgagacatgaaacgccggagataaacggaatttctcactttttagagcacatgttctttaaagggacgagcacaaaatctgcacgcgagatagcagaatcttttgatcgtattggcggccaggtcaatgcgtttacttcaaaggaatatacctgctactatgcaaaggtgcttgacgagcatgcgaattacgcgctggacgtattagcagatatgttctttcattcaacgtttgatgaaaacgagctgaaaaaagagaaaaatgtagtatatgaagaaattaaaatgtatgaagatgcgccggacgacattgtacatgatttattgagcaaagccacttacggcaatcattctttaggctacccaattttaggaacggaagaaacgcttgcttcctttaacggtgactctctcagacaatacatgcatgattattatacgccggaccgagtggtgatttcggtagcgggcaatatatctgacagttttatcaaagatgtagaaaaatggttcgggtcatacgaggcgaaaggcaaagcgacaggccttgagaagcctgagttccacacggaaaaactgacgagaaaaaaagaaacagagcaggctcatttgtgccttggatttaaaggcttagaggttggccatgaacgtatttatgatttaatcgtcctcaacaatgtgctcggaggcagcatgagcagccggctgttccaagatgtgcgtgaagataaaggacttgcttattctgtttacagctatcacagctcatatgaggacagcggaatgctaacgatttacggcggaacgggtgcaaatcagcttcagcagctgtcggaaacaattcaagaaaccctggccacattaaaacgtgacggcattacctcgaaagaactggaaaacagcaaagagcaaatgaagggaagcttaatgctgagcttagaaagcacaaacagcaaaatgagccgaaacggaaaaaatgaactgctgctcggcaaacataaaacattagatgaaattatcaatgaattaaacgccgtgaacttagagcgtgttaatggccttgccagacaattgtttaccgaagactatgcattagcacttatcagcccttccggcaatatgccgtcttaaaaaggaaagcctgccccataatggagcaggcattttttaatccctttcatcatacatagtacaagggggtgacagacatgcggctcagtgaattatcgggaaaggaaattgtagacatcaaaagagctgaacggctcggagtgctcggccagaccgatttggaaatcaatgaacaggatggacagattacagcactcctcattcccacagttaagtggtttggtttgagaaagcaaggtcatgacattcgtgtcccatggcaccatattcaaaagatcggttcagatatgattatattagatgtacctgaggaaatgcctcctcgacaagagtaaatagcccaattgactgtgaagcgggctctaaagaaaacatctgaaacatcggctgccggagccgatgtttttttatatggaaaaagcgcatcttttatattcaccggtatttccttttgatcataagatgaaggggagcttaacaactagagatccagtatatacaaagaaggtgaacgtttagaatgttaaccggattgaaaattgcagttatcggcggtgacgcaagacagctcgaaattataagaaagctcactgaacagcaggctgacatctatcttgtcggttttgaccaattggatcacggttttaccggggcagtaaaatgcaatattgatgaaattccttttcagcaaatagacagcatcattcttccagtatccgcgacaacaggagaaggtgtcgtatcgactgtattttcgaatgaagaagttgtgttaaaacaggaccatcttgacagaacgcctgcacattgtgtcattttctcaggaatttctaacgcctatttagaaaacattgcagctcaggcaaaaagaaaacttgttaagctgtttgagcgggatgacattgcgatatacaactctattccgacagtagaaggaacgatcatgctggctattcagcacacggattatacgatacacggatcacaggtggccgttctcggtctggggcgcaccgggatgacgattgcccgtacatttgccgcgctcggggcgaatgtaaaagtgggggcaagaagttcagcgcatctggcacgtatcactgaaatggggctcgttccttttcataccgatgagctgaaagagcatgtaaaagatatagatatttgcattaataccataccgagtatgattttaaatcaaacggtactttctagcatgacaccaaaaaccttaatattggatctggcctcacgtcccgggggaacggattttaaatatgccgagaaacaagggattaaagcacttcttgctcccgggcttccagggattgtcgctcctaaaacagctgggcaaatccttgcaaacgtcttgagcaagcttttggctgaaatacaagctgaggaggggaaataaggatgtcgtcattaaaaggaaaaagaatcgggtttgggctgaccgggtcgcattgcacatatgaagcggttttcccgcaaattgaggagttggtcaacgaaggagctgaagtccgtccggttgtcacatttaatgtaaaatctacaaatacccgatttggagagggcgcagaatgggttaaaaaaattgaagacctgactggatatgaggccattgattcgattgtaaaggcagaacctcttgggccgaagctgccccttgactgcatggtcattgcgcctttaacaggcaattcaatgagcaagctggcaaatgccatgacggacagcccggtgctgatggcggcaaaagcgacaatccggaacaatcggcctgtcgttctgggtatctcgacaaatgatgctcttggtttaaacggaacaaatttaatgaggctcatgtcaacaaaaaatatcttttttattccattcgggcaagatgatccatttaaaaaaccgaattcaatggtagccaaaatggatctgcttccgcaaacgattgaaaaggcactcatgcaccagcagcttcagccgattctagttgagaattatcagggaaatgactaaatttacagaaaatctttcccaaactaaaaaattcggtcatcacccgcatattctatggtaaaataaaacgtaaaatcatagtcaaatcaattcaatgaagctgattggcggaaggagttttacagatgggaagaggtttacacgtagctgttgtcggagcgacaggggctgtgggacaacaaatgcttaaaacacttgaagacagaaactttgaaatggacacacttacattgctatcttcaaaacgctctgcggggacaaaagtcacgtttaaaggccaagagctgactgttcaggaagcttctcctgagagctttgaaggggtaaatattgctttgttcagcgccggcggaagcgtatcacaagcattggcaccagaagctgtaaaacgcggcgctattgttatagataatacgagtgcgttccgcatggatgaaaatacaccgcttgttgtgccagaagtgaatgaggcagacttgcatgaacacaacggcattattgccaatccaaactgctctacaatccaaatggttgcggcacttgaaccgatccgcaaagcatatggcttaaacaaggtcatcgtatcaacttaccaggcagtatcaggagcgggtaatgaagctgtaaaagagctttacagccaaacacaggcgattttaaataaagaagaaatagagcctgagatcatgcctgtaaaaggtgacaaaaaacactatcaaatcgccttcaacgcgattccgcaaatcgataaattccaagataacggctatacgtttgaggaaatgaaaatgataaatgaaacgaaaaaaatcatgcacatgcctgaccttcaagtagcggctacatgtgtgagactgccaatccaaactgggcactcagagtccgtctacatcgaaatagaccgtgatgacgctacagttgaagatattaaaaatctattgaaagaagctccgggcgtgacacttcaggatgatccaagccagcagctttatccgatgcctgctgatgctgtcggcaaaaacgatgtgtttgtaggccgcatccgcaaagacttggacagagcaaacggttttcatttatgggttgtttctgataacctattaaaaggcgcggcatggaactctgttcaaattgcagaaagcctgaaaaaactaaacctcgtataaaagagagaattttctaaagacgaatagaagagagtaaggcgctatcagcctgctctcttctgttacgtccgaataatttggagtgaaaacagtgaagataattgttcaaaagttcggcggaacatcagtaaaagatgataaaggccgcaaactggctttagggcatattaaagaagcaatcagtgaaggatataaggttgtcgttgtcgtttcagcgatgggccgaaaaggggacccgtatgcaacagattctttgctcgggctgctttacggcgatcagtcagcgatttctcctagggagcaggatttgcttttatcttgcggagagactatttcctctgtcgtctttacaagcatgctgcttgataacggtgtgaaagcagctgcgctgacaggggctcaggctggctttttaacgaatgatcagcatactaatgcgaaaatcattgaaatgaaaccggagcgtttattcagtgtgctcgccaatcatgatgcggtagtcgtcgcaggcttccagggcgcaactgaaaagggtgatacaacaacaatcggcagagggggcagcgatacgtctgcagccgcactcggagcagctgttgatgcggaatacatcgatattttcaccgatgtagaaggcgtgatgactgctgacccaagagtggtagaaaatgcaaaaccgcttcctgttgtgacgtatacggaaatctgcaacctggcgtatcagggggccaaggtcatttctccgcgtgctgtggaaatcgcaatgcaggccaaggttccgatccgcgtccgttcgacttattcgaatgataaaggcacattggtgacatcacatcactcttccaaggtcggcagtgatgtttttgaaaggctgattacgggaatcgcccatgtcaaagatgtcacgcagttcaaagtgcctgcgaaaatcggccagtataacgttcagactgaagtgttcaaggctatggcaaacgctggaatcagtgtcgatttctttaacattacacctagtgaaatcgtctatacggtagccggaaataaaacagaaacagctcagcgtattttaatggatatgggctatgatccaatggtgacgagaaactgcgcgaaggtatcggcggtcggcgcgggcattatgggtgttcccggtgttacgtccaaaattgtatcggctctttcagaaaaagaaattccgatccttcagtcggctgacagccatacgacgatatgggtgctcgtccatgaagcggatatggttcctgctgtaaacgctttgcatgaagtgtttgaactttcgaagtaaatgtgattgaatcatgatgaggtgaataaaatgaatttcggaaatgtgtctacagcgatgattacaccctttgacaataaagggaacgtagactttcaaaaactgtctacactgattgattacttgttgaaaaacggaacggattctttagtagtagcgggaacaactggagaatctccgaccctttcaactgaagaaaaaattgcgctttttgaatatacggtaaaagaagtaaacggacgggtgcccgttatcgctggtactgggagcaacaacacgaaagattccattaagctgacaaaaaaagctgaggaagcgggcgtggacgctgttatgcttgttaccccgtattacaataaaccttctcaagaaggaatgtaccagcattttaaagcaattgcggcagagacatctcttccggttatgctctataatgttcctggccgtacggttgcttctcttgctcctgaaacgacgatccgtttggcggcagacattccgaatgtggttgcgattaaagaagcgagcggagacctcgaagcgattacaaaaattattgctgaaacacctgaagacttctatgtctattcaggggatgatgctctaacgcttccaattctttcagttggaggtagaggagttgtgtcagtggcgagccatattgcaggcactgatatgcagcaaatgatcaaaaattatacgaatgggcaaacagctaatgcggcactgattcatcagaaactgctgccgattatgaaggaactgtttaaagcgcctaatcctgctccagtcaaaacagcgcttcagctgagaggtcttgatgtcggttctgtgcgtctgcctctagtcccattaactgaggatgaacgtctgagcttaagcagcacgatcagcgaactgtaagaaaatttcatacagtgaaacaaacgcggtcattctcacattcagctgagtttgaccgtttcttttacatattggttttccctaaaccttctgctttatcttgttttctaaatttactttcagttataataggaacaagtgatgatggacgggtatgagactaggaggatatagattttgaaaaagaaaaatacagaaaacgttagaattatcgcccttggcggtgtcggagagattgggaagaacctttatgtcattgaaattgactcagacatatttgtcgttgatgccggccttatgcatccagaaaacgaaatgctcggtattgatgtagtgattcctgacatatcatatttgattgaacgggctgaccgcgtcaaggcaatctttttaacgcacgggcacgatgaaaatatcggcggcgttttttacttattaaacaagctgtccgttccagtgtacggaacaaaactgacgcttgcactgttaagagagaaattaaaacaatacggacataaccgaaaaactgatttaagagaaattcactccaaatctgtcattacatttgaatcaacaaaggtatcgttctttagaacgattcacagcattcctgattctgtaggtgtgagctttaaaacatcacttggatctattgtatgcacgggagacttcaaatttgaccaaacacctgcacttaatcagacgtgcgacattggcgagatcgccaagatcggcaatagcggcgtgctcgctctgctttctgacagtgcaaatgcggaacggccgggttacaccccttcggaagcggctgtcagcggagaaatttcggatgcgctgtataattcacagaaccgggtgattattgctgttttcgcatccaatattaaccggattcagcaagtcattcatgcagcggctcaaaatggcagaaagattgccgtagccggaaaaaatcttcaatctgtcctgcagctggcgagaaagttaggatatattgaagcagatgatgaattgtttatttctgtacaggatgtcaaaaaatatccgaagcgcgaagtggccattattacagccggaagccaaggtgaaccattagctgctttgacaagaatggcaaacaaagctcacaaacagctgaacattgaagaaggggatacggtggtcattgcgtcaactccgattcccgggcaggaactcatttactctaaaacagtagatcttcttgcgagagccggtgcacaagtcatctttgcccaaaagcgtgttcatgtatcaggccacggctcacaagaagagttaaagctgatgatcaacctgcttaaaccaaaatatttgattcctgtaaacggcgaatacagaatgcaaaaagctcattcaaaaatcgctgaagaaaccggcatgaagcgcagtgacatcttcttaattgaaaaaggcgacgtcgttgaattccgcggccaaaacgtaaaaattggggataaagttccttacggcaatattttaattgatggtttaggtgtcggtgatatcggcaatatcgtattgagagaccgccgcttgctttcacaggacggaattttaatcgttgtcattacacttgataaacaaaagaaacatcttgtatcaggaccagaaattatcactcgcggctttgtttatgtaagagagtctgaaggtcttatcgtacaggctactgagcttgtacggtccatcgtgacagaagcgactgaaacatcaaatgtcgaatggtcaacgctgaagcaggcaatgcgggatgctttgaaccaattcctttatgaaaaaacgaaacgtaaaccgatgatcatcccaattattatggaagtataatgactgactaaagaccggagctgctccggtctttattttttgtccttcaagccgggattgaatgaagtatctttgttcataatacaaagagaaactcggaaaggatgaaagcgagatggatcatcgtatggaaaacacagaagaagagcgtcctgaaaaaaatgatgcgaaggacagcattatgaataaaatacagcagcttggtgaaacgacgcttccgcagctgccccaagatacaaatattcattgtctgaccattatcggacaaattgaaggccatgttcagcttcctccgcaaaacaaaacaacaaaatatgaacatgtcatcccgcagattgtggcaattgaacaaaatcccaaaattgaaggcttgctgatcatattaaatactgtcggaggagatgttgaagctggtcttgccatagcggaaatgcttgcatctttatcgaaaccgaccgtttctatcgtgcttggcggggggcattcaatcggcgttccgattgctgtatcctgtgattacagctatatcgccgaaacagcaacgatgacgattcatccagttaggctcaccgggctggtcatcggggtgccgcaaacgtttgaatacctggataagatgcaagaaagagttgttaaatttgtgacaagccattccaatataaccgaagagaagtttaaagagctaatgttttcaaaaggaaacttaacacgcgatatcggaacaaatgtagtcggtaaggatgcagttaaatacggattgatcgatcacgcaggcggtgtcggacaggcaatcaataaactgaatgagctcatcgatgaagcaaggaaagaagaaggacggatgattcaatgattctttataccgtgatgcctcaggaaattgtgtttgcagaacagaaccaagagacaagcgcacatgagcaaattgaatataaaggtgtaccgcttctagtcgaaatgaaagggaatgaagcggaagtcattcaaatcatgagcaccaatccaatgcattttctgcatccggacatttcaccgggacaaaagctgaaattaaacgtataagaatccaacccttttttaagggcaaaatatgctataataggggaatcctacagaaaaaacgcagcctgtaaacggctgctttcttcattatgtatgaacttacattttttaacgcagtaaggtgatgagtgtggcaaagaaaaaacgaaaatcaagaaaaaaacaggcgaaacagctcaatataaaatacgagctcaacggattgctgtgtatagccatttcaattatcgcaatcttgcagctgggggtagtcgggcaaacgtttatctatttgttccgcttttttgctggagagtggtttattttatgcttgttaggtttattggtgttaggagtctcactgttttggaagaaaaaaaccccaagccttttaacgagacgaaaggccgggttgtactgtattatcgcaagcatattgctgctttctcacgtgcagctatttaaaaatttgacgcacaaagggtctattgagtctgcaagcgtggtgcgcaatacgtgggaattgtttttaatggacatgaatggcagctctgcttcacctgatttaggcggagggatgatcggtgcgctgctgtttgcggcttcacactttttgtttgcgtcgactggttctcagatcatggcaattgtcatgattttgatcggaatgattttagtaacaggacgctcgctgcaagaaacgctaaaaaagtggatgagcccgattggacgttttataaaagaacaatggttagcatttattgatgacatgaaatccttcaaatcaaatatgcagtcatcgaaaaaaacgaaagcgccgagcaaaaaacaaaaaccggcccgcaaaaaacagcaaatggaaccggagcctcctgatgaagagggggattatgaaacagtatcgcctcttattcattcagagccgattatctcaagcttttctgatcgtaatgaagaggaagagtctccagttatagaaaagcgcgccgaacctgtgtcgaagccgcttcaggacatccaaccggagacaggtgatcaggaaactgtttctgctcctcctatgacctttacagagctcgaaaataaggattacgagatgccgtcactggatttgctggcagatccgaagcataccggccagcaggctgataaaaagaatatttatgaaaatgcgagaaagcttgaacgcacattccaaagctttggcgtaaaggcgaaagtcacacaggttcatctcggaccggccgtaacaaaatatgaagtatatcctgatgtcggagtgaaggttagcaaaattgtcaatttaagcgatgatttagcgcttgcgcttgctgcgaaggatatcaggatcgaagcgcctataccaggcaaatcagcaatcggaattgaagttccaaacgcagaagtggcaatggtttcgctgaaagaagtgctggagtctaaattgaatgacagaccggatgcgaagctgttaattggactcggccgcaatatttcaggtgaagctgtattggctgagttaaacaagatgccccaccttttggtcgcaggcgcaaccggtagcgggaaaagtgtctgtgtcaacggcattattacaagtattttaatgcgggcgaaaccgcatgaagtgaaaatgatgatgatcgatcctaaaatggtagagctaaatgtctacaacgggattccgcatttgcttgctcctgttgtaaccgatccgaaaaaagcgtcgcaggctttgaaaaaggttgtcaatgaaatggagcggcggtacgaattattttctcatacgggtacaagaaatattgaaggatacaatgattatataaaacgcgccaacaatgaagaaggagcgaaacagccagagctgccttatattgttgtcattgtggacgagctagccgatctcatgatggtcgcttcatctgatgtggaagattcgattacgagattgtcccaaatggcgcgggctgccggcatccatcttattattgcgacacagcggccatcggtggatgttatcacaggggtgatcaaagcgaacattccgtcacgaatcgcgttcagcgtatcttcacagacggattcaaggaccattcttgacatgggtggcgctgagaagcttcttggccgcggcgatatgctgtttttacctgtaggggctaacaaacctgtccgtgtgcagggagcatttttgtcggatgacgaagtggagaaggtcgtcgaccatgtgattactcagcagaaagcgcaatatcaagaagaaatgattcctgaggagacgacggaaactcattccgaggttactgatgaactttatgatgaagctgttgaattaatcgtcggcatgcagacggcatctgtttcaatgctgcaaagaagattcagaattggctatacgagagcggcgcgcctgattgacgcaatggaggaacgcggtgttgtcggaccgtatgaaggcagcaaacctagggaagtattattatcaaaagagaaatatgatgagctctcttcttaatgaagggagttccgctttctatagttgtcaataatgatattatgtaaactgatcacctttctatttattttttcgacaaaacatgatatagttgtcccaattgttcaataatttttatcgaaagtggtttacggaggggaaacatgtctacaaaagctgataatcggcacttgtatttgaaagtaattgaacgaattaaagaggatataaaaaatgggatctacactgagaaggaaaagctgccttctgaatttgagctttccaaaaagcttggtgtcagcagagcgacgctaagagaagccttgcggatactggaagaagagcatgtgattatcagaaggcatggtgtaggcacttttgtccattctaagccgttatttctttcgggtattgaacagctgaacagtgtaaccaagatgatagaacaggcgaatatgacccctggcacgatttttctatcatcacaagtgcttatgccgtctgaagatgatacgaagagatttcacttggcagaagggcaagaacttttttaccttgaacgagtcaggacagctgacggacagccgattgtgtattgtatagacaaaattccgatgaatattttgccgaattctttttctcatcagcaagaatctatgtttgacctgctagagaaaaattcaggctccgtaatcagctatgcagtaactgatatagaaccgatcggctatcacgataccatttctccagtgcttgaatgcgatccggaaacagctcttttgctgttaaaacaaacccattacgatcagcacgataaaccggtgctttattctttaaattattttagagcggataaattcagatttcatgttttgcgtaaacgattctaaaaacggacgcctgtatgtgtctgtttttttatttgcactgattcatgtttctttgtacatactttcattccggttaacgcaatatataagggatgacaagaaagtgaatgggtgaaaatgttgagagagaaaaatggaatgaaaaatattattgcattgtcttctgtcccgcttgtgatgacactcgggaactccatgctgattcctgttcttccgatgatggagaaaaagctgtctgtgacttcatttcaagtatctttaatcattactgtatattcagtagtagcaattatttgcattccgattgccggatatttgtcggatcgtttcgggagaaaaaaaatattgcttccatgcctcctcattgcaggattggggggagccgtagctgcttttgcctcgacctatatgaaaaatccttatgctatgatcttggcggggcgggttcttcaaggcattggttctgcaggtgccgctccgattgtcatgccgtttatcggcgacctgtttaaaggagacgatgaaaaggtcagcgcgggtcttggcgatattgaaaccgccaacacgtcagggaaggtactgagtcccatacttggagccttactggcttcttggtattggtttgtaccgttttggtttattccgtttttctgtttgatcagctttttgctcgtattgtttttggtggccaagcctgaagaagatgaagatgcgcctgctgtttctgagtttattaagagtgtgaagaaaatttttaaacaggatggtcgctggctttatacggtcttcattatcgggtgtgtcattatgtttttgttatttggcgtattattttatttatcagatacgctggagaacaagtatgctattgacggagtagctaaaggcggattactggcaatcccacttttgtttttgtcaaccagttcttttatagctggcaaaaagatcggtaaagataaaggccgaatgaaattttgcgttgttacaggaatgattctgttaaccctttcgtttattgccttgtggtggaaccacagtttttattttttatttgtctttttaagctttggcgggattgggattggaatggctcttcctgctttagatgcattgataaccgaagggattgaaagtgaacaatgcggaaccatttcctccttttacaatagcatgcgctttataggagtagctctcggtccacctgtttttgctgcattaatgtctaatgcaaactggattattttcatactctcggcgttttgcagcatcgtttctttatttttagtgctctttactgtagatgctaaaaaaagtgaagaagaaaaaaacttagggacggtctagccagccgtctttttttgcgctttcttgcacagtttacaactgtacctatacagcatgcggaggttattgtttccttataaatcctacagttgctataattacatgaaagagtgtttctgcggatgctgaaaattggtcataatacatactaattaagaaatgaacgaaggaggttccatatgtcatatgttaatgaactcaaatcaaagcacggcggtttaaccgcacacattgtaaaaacagaaaaattcaaaaccgtctcgcttatttttaagatgcttgcgccgctgacaaaggatcaagtcaccaaaagagcgcttctcccgcatgtgcttcttcgcggaacgaaaagccatccgaaaaccgcaggattgcgttcatacttggatgagctgtacggcacgtcagtatcggctgatcttacgaaaaaaggagagcggcatgtcattacgttcaggcttgaaatcccgaatgaaaaatatttaaaagaccaaacgccgcttctcgagaaagggctccagcttctcgcagaactcgtcttttcacctgctttggagggagacgcttttcagtcacaatatgtggctcaagaaaaacggacgcttaagcaaagaatccaagccgtctatgatgataaaatgcgttattcgaatttaaggctgatacaggaaatgtgcaaaaatgatccttacgcgcttcatgtcaatggtgaaatcgacgatgtcgatgacattacggcagagcaattatacgaaacataccaaagcgctatccaaaaagaccagcttgatctatatgttgttggcgacgtggacagtaaccaggtacaatcggcaattgataagtatttcaaaacagaagagcgcactcttggcatgattgaaaacaatcacgctgatgaaaaagttcagccaaaagaagtaattgatgaagaggatgtcaagcaaggaaaactgaatatcggctaccgcaccagcatcacttatacagatcaggattatcctgctttacaagtgtttaacggattgttcggcggattctctcattctaaacttttcattaatgttcgggaaaaagccagtcttgcttactacgcggcttcgcgtatagaaagttttaaaggcttgttaatggtgatgtcaggcattgaagtgaaaaattttgaacaggcggtttcgattattgctgagcaattccaggcaatgaaaaatggcgatttcagtgagcaggatatagcacagacaaaggccgttattcgaaatcaagtgctggaaacgattgatacagcatacggtttatctgagtttttatatcagcaggccgctgctcaagtcgagattcctatcgaagactttcttgccaatattgagaatgtcacaaaagaggatatcattaaagccggcgaaaagattcagcttgatacgacttatttcttaaaagggacggagggtgcatcttgatcaaaccaatcgaatatgaacagcttcaggagacgctgtatcatgaaaaaatgtccaacggccttgatgtttacgttttgccgaaaaaaggcttcaacaagacatatgcggtctttacaacaaagtacggctcgatagataaccggtttgtccctttaggtaaaaacgagatggttcacgtgccggacgggattgctcactttcttgagcacaagctgtttgagaaagcggacggagacgtttttcaagatttcagcaaacagggggcttctgccaatgcgtttacgtcatttacaagaacggcttaccttttctcaagcacatcaaatgttgaacgcaatttagagacgcttatcgatttcgtacaggacccatattttactgaaaaaacggttgaaaaggaaaaagggattatcgggcaggagattaatatgtacgacgataaccctgattggaggctttacttcggggtcattgaaaacatgtacaaagagcatcctgtcagaattgacatagcgggaacagtggaaagcatttcacatattacaaaagaccttctttatgaatgctatgaaacgttttatcacccgagtaacatgctccttttcattgtcggccctgtagatcctgaagcgattatttctcaggtaagagaaaaccaggggaaaaagccgtatactgatcagccggagatcaaacgagaagaagtgaaagagcaagaagcggttttccgaaaagaaaaagagatcaaaatgaacgtgcagggaccgaaatgccttgttgggctgaaatccaaaaatccgtttaaattaggcaaagagctcttaaagcatgaactttcaatgaacttattgcttgaagctctttttggcaaaagctctgcccagtatgaatcactttatgaaaaaggatatattgacgaaacgttcagctttgattttactgctgaatatgggttcggttttgcggcgatcggcggagatacgcctgagcctgatcaattggctgaagacatttcaagcatgcttttgcgcgccggtgaactgattactgctgaaaagattgaacttgccagaaagaaaaagatcggcacattcttaaaagcgctgaattcccctgaatacatcgccaatcaatttacccgttatgcgttcttggatatgagcctgtttgatgttgtaacggtactcgagcagattaccctcgaggatgtccagaacgtaatacaagaggaaatcgctgcagacagactgactgtctgcaaggttgttcctaaatcataaacaaaacatccctccagtgtgaggggtgtttttctgcggaaagaaggaaagaggatgaacaaaacagcactaatcaccggagcaagcggcggcattggcaaaagcatcagcgaaacccttgcagctagaggatacaatctgctgctgcattacaatacaaatcaaaacgcggcagcggagcttgctgaaaaactaagtcagatgtttggcgtaaatgcggagatattacaagctgacctgtccgcgcaagatggagcagataagctgacaagttcaattgttcagccgattgatgcgattgttttaaacagcggacgaagccattttgggctgattacggatgtagataacgcaacggtccaggaaatggttcagcttcatgtggcgagtccgtatatgctgacgagaaaccttctgccaggcatgattcggaataaatcgggagcgattgtggctgtcagctcgatttggggagagactggagcatcctgtgaagtgttgtacagcatggcaaaaggagctcagcattcatttgtaaaaggattggctaaggagctggcgccaagcggaatcagagtaaacgccgtagcgccgggtgcagttgatacaaatatgatgaatcaatttaccccggctgaaaaagaagagatcgctgatgagattccgatcggccggctggcccggccgcaagaaattgcggatgcaacagcttttctcctgtctgaaaaagcgtcatatatcaccggccaaattctgtcggtgaatggcggctggcactgctgatccgaaaatattcggtgtatagtttcttttgcgaaggacacaataatcttgtaacttcacatgaaatggaggaaacaagcatgtcagtattagaaaactgggatagctggaaaaacttccttggcgaccgtctgaactatgcgcaagataaaggtatgagccaggatacgattacagatcttgcgacagaaatcggcagctacttggctaatgaagtggaatctaagaacgagcaggaaaaagtgctggcagatctttggagtgtagcatcaaaagatgaacagcacgccattgccaatatgatggttaagcttgttgaaaataacagcactcactaggaagagaggggatttttcctctcttttttatgttttcctcatcacagcaacattcttctttctaattagagaaaaatgctttatgataaaggaaggtaaaattttgccacaatgaagggggtatatcatttggcaaagctcgaatggtattttgaatatgaaattcaagtgaaccgccccggactgctcggggatatttcatctcttcttgggatgctttctatcaacatcgtaacgataaacggcgtcgatctttccagaaggggaatgctcctcaggtgccgccatatagatcaaattaaacgattagaatcaatcttaaaaacgatggaaacaattaaagtaacgaagcttagagaaccgaggcttcgcgaccgtcttgccgtacgccacggccgttatattcaacgggatgccgatgacaagaaaacgttccgctttgaacgggacgagcttggcttattagtcgattttatggccgaattgttcaaaaaagaaggccataaattaatcggaatcagaggtatgccgcgtgtcgggaaaacggaatcgattgtagcctctagtgtgtgtgcgagcaaaaggtggctgtttgtgtcatcaaccttgctgaagcagacgataagaagccagctgattgccgatgaatacagcactgaaaatgtctttatcgttgacggaattgtgtcaacacgaagagggtcagaacgccatctccagctggtccgagaaatcatgcggctgcctgcaacaaaagtggtggagcatccggacatattcgttcaaaatacagagtatacactagatgactttgattatattattgaactgagaaatgaccctgatgaggttattacatatgaacatgccgaggaaccccaaatgtttgatcaatccgggttttcaagctttgatttttaaaattggaaggtgtttgttgtgactgaactaggaatccggctcaaagaagccagagaggaaaaagcaatgtcattggatgatctccaagcggcaacaaagattcaaaaaaggtatttaaccgccttggaggaaggaaactatgacattattccggggaagttttatgttcgggcattcatcaagcaatatgcagaagccgttgggcttgatgcggatcagctgtttgaggagcataaaaaagatatccctaatacgtatcatgatgatgtgtctgaaaagatctccggcatgaatcttcaaaaggaaatgccaaagccagcatctaaggcgctggagctgctgccaacaatacttgttattctcggcgtgattgtcgtgattgccattgtgtacgcgatcattcaatttgccaatcacaaaaacagtgatgatcacaatgcggcatcagaaaaagcaattacgcaaagtgagagcaagtacgaaatccctaaagattcaacgctgaaagagaatcaaaataacagctctgaaaaagagacagacactaaaaaagaaacgaaagaaaacgaagataagaaaaaagaaaatgacagtgagaagctggagattaaagctgctggcactgaaggatcgttaacgacttatgaagtgtccggcgctgataaaatcgagctggaactgaaggcatcagacagctcctggattagagtgcgcgatgaaaacagcagctctttaaaagaaggaacgctgaaaaaagacgaaacctataaaaaagacataactgatcagaaacaagttgatatccgcaccggatatgcacctaatctgaaaataaaaatcaacggtaaggttctttcatatgaacttgatccgaaaaaagtgatggcacaaaccataaagattgtaaataaaaaggaagaaaagtcatcttaattaccagatgacttttcttcacgtccgagtatgaaattggaggggctttatgtttaacttaccaaataaaatcacactagctagaatcgcattaatcccaatcttcatgattatcatgctggcgccgtttgactggggcaggctcgaagttggagacgaatccatcccggtcgcacatttggcgggggccattctatttattattgcatctacaacagactgggtggacgggtattatgcccgaaaattaaatctcgtaacaaacttcgggaaatttcttgatccgcttgcggacaaactgctcgtatccgcagcgttaattatccttgttcaatttgatctcgctccagcttggatggtcattgtgattatcagcagggagtttgccgtgacaggtttaaggcttgtcttagccggaacaggagaagtcgtagctgctaacatgcttggtaaaatcaaaacctgggcacagattattgcggtatctgcattgcttcttcataatcttccatttgaacttgtgtcattcccgtttgcagacttggcgctgtgggtagccgtcttctttactgtcgtctcaggctgggaatatttctctaaaaattgggaagcgttaaaaacatctaactaagaaagaaggacttcgtcatggaatttccaaaaaaagcagaaataattgcagtcggttcagagttgctgcttggtcaaatcgccaatacaaatgctcaatttatcagcaaacagctcgctgaaatcggggtcaacgtattttatcatacagcggtcggagataacccggagcggctgaagcaggtcatccgcattgctgaagaacgctctgacttcattattttttcaggagggcttggacccacaaaagatgatctgacgaaagaaacgattgcaaatacgctgggacgtccgcttgtgttaaatgatgaggcattccaatccattgaggactatttcaaacgaacaaaacgcacgatgtcacctaataaccgaaaacaggcgcttgtgatcgaaggctctgacgtgctggcgaatcactttggaatggccccgggaatgctcacagagcatgaatcgcgctattatatgcttcttcctggaccgccgagcgaattgcgtccaatgtttgaaaacgaggcaaagcctcttctgctgaaaaagatgggttcaaatgaaaaaattgtgtcaactgttcttcgctttttcggtatcggtgaatctcagcttgaagccgatttggaagatattattgatgcacaaaccaatccgacaattgcgcctttggcggctgatggagaggtgacgctgcgtctgacagccaaacacgccgatgaaaaggaaacagagcgtctgttaaaagaaacagaggccgttatcttagagcgtgtcggtgaatttttctatggttacgatgatacttctcttgtaaaagagctatctatagcatgtaaggaaaaaggcataacaatttctgcggcagaaagctttaccggagggctgttttctgaatggctgacggatcatagcggtgcctcaaaattatttgccgggggcgttgtttgctatacaaacgacgtgaagcagaatgtgcttggtgtcaagaaggaaacattagatcgttttggggcggtcagcaaggagtgcgcatccgaactggctaagggtgttcaaaaactcactggcagcgatatcggcattagctttactggtgtagcaggacctgatgctcaagaagggcatgagcctgggcatgtgtttatcggcatttccgcaaatggtaaagaagaggttcacgagtttcactttgcgggctccagaacggggatcagaaaacgcggcgctaaatacggctgccatttaatcttaaagcttttagagcaaaaataatattttcagcacattatcctcctaagaaaacatgatttctctgatacattatgatattttgataggaatcacgccaagaaaaaatccgaatatgcgttcgcttttttcttggcaaatcccttcaaacagggtatagtatatgtagtggtaacataaaggaggaaaaaatagaatgagtgatcgtcaggcagccttagatatggctcttaaacaaatagaaaaacagttcggcaaaggttccattatgaaactgggagaaaagacagatacaagaatttctactgtaccaagcggctccctcgctcttgatacagcactgggaattggcggatatcctcgcggacggattattgaagtatacggtcctgaaagctcaggtaaaacaactgtggcgcttcatgcgattgctgaagttcagcagcagggcggacaagccgcgtttatcgatgcggagcatgcgttagatccggtatacgcgcaaaagctcggtgttaacatcgaagagcttttactgtctcagcctgacacaggcgagcaggcgcttgaaattgcggaagcattggttcgaagcggggcagttgacattgtcgttgtcgactctgtagccgctctcgttccgaaagcggaaattgaaggcgacatgggagattcgcatgtcggtttacaagcacgcttaatgtctcaagcgcttcgtaagctttcaggggccattaacaaatcgaagacaatcgcgattttcattaaccaaattcgtgaaaaagtcggtgttatgttcgggaacccggaaacaacacctggcggccgtgcgttgaaattctattcttccgtgcgtcttgaagtgcgccgtgctgaacagctgaaacaaggcaacgacgtaatggggaacaaaacgaaaatcaaagtcgtgaaaaacaaggtggctccgccgttccgtacagccgaggttgacattatgtacggagaaggcatttcaaaagaaggcgaaatcattgatctaggaactgaacttgatatcgtgcaaaaaagcggttcatggtactcttatgaagaagagcgtcttggccaaggccgtgaaaatgcaaaacaattcctgaaagaaaataaagatatcatgctgatgatccaggagcaaattcgcgaacattacggcttggataataacggagtagtgcagcagcaagctgaagagacacaagaagaactcgaatttgaagaataaaaataaaataagtttcaaatgatacaaaaggctgagtgaaaaactcagcttttttgtattttgcaaaaaaatgataaaaatattgctttttttgacaacttttttagggctttattcgtctaacaaaacgtgtgcaaaatggaatttattttgggaggaaaaaatgaatgacaagcccaacccgcagaagaactgcgaaacgcagacggagaaaactaaataaaagaggaaaactgttgtttggtcttttagcagtgatggtttgcattacgatttggaatgctcttcatcgaaatagtgaagaaaacgaaccatctcaagaaactgcagcggtttcaaataccgatcagaaaaaagaggtcaaaaagaaaactgccaaaaaatcagaggaacaaatcaaaacagtggatcgaaaccaaaaaatcagcaattatttaaaagagatcggtttcagcggaacagccatgattgtcagaaatggagaaatcgtaacaaataaaggttttggctatgctgaccgtaaacactacattcaaaataatccattgacatctttttatgtcggttcatcacaaaaagcgctgattgcaactgctattttgcagcttgaggaaaaggggaaacttcagacaagtgatccggtaagcacgtatttacctcattttcccaacggacaaacgattactttgaagaatctgcttacacatacatcggggataaacggacatattgaaggaaacggcgccattactccggacgatttaataaaagatatagaacttcagggaatcaaacgtcagccgggcgtatgggactacaaggattccaactattctgttcttgcttatattattgctgaagtaagcggtgagccctatgaacagtacataaagaatcatatttttaaacctgcgggaatgacgcatgcaggcttttacaaaacatatgaaaaagaaccttatcctgccgtcgggtataagatggagggcagcaaaacagttacaccgtatatacctgatttatcccagctgtatggagcgggtgatatttatatgagcgctatagatatgtacaaatttgaccaagcgctgatagacggaaaactgtattcgcaaaaaagctatgaaaagatgtttacgccagggagcagctccacatacggcatgggattttatgttgctcccggaagctattcaaaccatggtgttatgccgggcttcaatatcttgaacagctttagcaaatctgggcaaaccattgttattttgttctcaaacattcaaaataatgctaaattgggccaagtgaacaataaaatataccagcttctaaatcaagaatgattggcgatcttcttttggatgaattgcattcggcacgtgaaaagaagactggcctgcaaacgttaagatggcaagcttgacaagtatttccgacacatttacaatgaagttgtaacatttgtttttttaacatgattgttaaaccatttaaacttgacaagggcgatgaacacactcattccctgtgaaggttctgtatgttgagaaaactagacaatgtacatgccgacactttttaagcaacaaccaagttcatagcaagaggaggtgaaagtatgaccccaattatgatggttctcatctccattttgctgattctactcggtttagttgttggctactttgttcgtaaaaccattgccgaagcgaaaattgcgggcgcacgcggtgcagccgagcaaattcttgaagatgcgaagcgtgatgctgaagcactgaaaaaagaagctctgcttgaagcaaaggatgaaatccacaaacttcgaatagatgctgaacaggaagttcgtgaaagacgaaatgagcttcaaaaacaagaaaaccgtttactccaaaaggaggaaaaccttgatcgcaaacatgagggaattgataaacgggaagcgatgttggagaagaaagatcattctctgaatgaacgacaacaacatattgaagagatggaaagcaaagtggatgagatgattcgtatgcagcagtctgagttggaacgaatttcgagtctgactcgtgacgaagcgaaacaaatcattcttgagcgggttgaaaacgagctttcacatgacatcgccatcatgacaaaagaaactgaaaaccgtgcgaaagaagaggcggataagaaagcgaaaaacattctttcactcgccttacagcgctgcgcagcggaccacgttgccgaaacaacggtatcagttgtcaatcttccaaatgatgagatgaaaggacgtatcatcggacgggaagggcgtaacattcgtacgcttgaaacgctgacaggaattgacctgattattgatgatacgcctgaagctgtcattctttccggatttgatccgatcagacgtgagacagccagaattgctcttgataaactcgttcaggatggccgtattcatccggcacggattgaagaaatggttgaaaaatctcgccgcgaggtcgatgactatattcgtgagatgggtgagcaaacgacatttgaggttggcgttcatggcctccacccagatctcatcaagatcctcggccgcttaaagttccgtacaagctacggtcaaaatgtgcttaagcattccatggaagtcgcattcttggccggtctaatggcatcggagcttggtgaagacgcaaagcttgctaaacgtgcgggtcttcttcacgacatcgggaaagcaattgaccatgaagtagaaggaagccacgttgagatcggggtagagcttgcgaccaaatataaagagcacccagtcgtgattaacagtattgcatcacaccacggggacgaggagccgacttccattattgctgtactggtagctgcagcagatgcgctttccgctgcaagacctggcgcaagaagtgagacgctcgagaattatattcgaagacttgaaaaacttgaagaaatttctgagtcctacgaaggtgttgaaaaatcatttgccattcaggctggacgcgaagtgcgaattatggtgaagccggattcaattaatgatcttgaggctcatcgactggcgcgagatatccgcaagcgaattgaggacgagctcgattatccaggtcatattaaggtgacagtaatcagagagactcgagccgtagagtatgcaaaataaagtgatgcgctaagcatcactttatttttttgacggcaaggaattttcaagaagaaaggatttacaaaatgagaattttatttatcggagatgttgtcggttcaccgggccgtgacatggtcaaagaatatgtaccaaagctaaaaacaaaatataagcctcactttaccattattaatggtgaaaacgccgcacatggaaaaggcctgacggaaaaaatttatcacagcttaatccagtccggcgcagatgcaatcacaatggggaaccacacatgggacaaaaaagaaatatttgattttatagatgacgttccgaacttggttcgcccggcaaactttcctgaaggaacaccggggaaagggatcacatatgtgaaagcaaacggcaaagaactagcagtcattaatttgcagggacgtacgtttttgccgccgcttgatgacccgtttttaaaagcggatgaattgatcgcagaagctgcgaaaagaacaccgtacatttttattgactttcatgccgaagcgacaagtgaaaagctcgcacttggctggtacacggatggacgggcatcggctgtagtaggaactcatacacacgtgcaaacagcggataaccgcattttgccgaagggaacggcatatattactgatgtgggaatgactggcccgtatgacggtatactggggatggacagagagacgattattaagcgattcaaaacgaaccttccagtccggtttactgtcgctgaaggaaaaacaacgctcagcggagttgtcattgacattgacgatcaaacgaaaaaagccgtgaaaattgagcgtattttaatcaacgatgatcacatgttctttgaatagttgaacatatggttattttataaaaatattaaaaagaaaagcaggaatatagcaactccttagtgaatatagtaaaaatggaaggtagcccgctatttttgaaaagcattgtggggatggctttttggatagcaacatctaataatgattgttctaatgaacactcacttatccattgtaaaactaagggggagcagaaatggaaatcttaaaagtttcagcaaaatcgagtccaaattcagtggcaggtgcgcttgcaggcgtgttgagagagcgaggagccgccgagattcaagcgatcggagcgggtgcattaaaccaggctgtaaaagctgtggcgattgccaggggatttgtggcgccaagcggcgttgatttgatttgtattccggcttttacagatattcaaatcgatggggaagaaagaacagcgattaaattaatcgtggagcctcgctaaaaacaaataaagcattctcaacctgtttgcgtaatgcaaacaggttgtttttcatttattgtgatattttctcccgatagtatttttagcacataaatgagcgaatatacaaaatcagaaatgagctaaaacgtttcaaaaaaaatttccgcccatttttcaagacagatacttttgtccttctggaaaagacagttctgtttacgcttattccatatcatggtacaatccgaatataacaagaatttttcaaggaggattgtacatgcagagtggaaagatgaaagctctaatgaaaaaggacggggcgttcggtgctgtgctgactgaagttcccattcctgagattgataaacatgaagtcctcataaaagtgaaagccgcttccatatgcggcacggatgtccacatttataattgggatcaatgggcacgtcagagaatcaaaacaccctatgttttcggccatgagttcagcggcatcgtagagggcgtgggagagaatgtcagcagtgtaaaagtgggagagtatgtgtctgcggaaacacacattgtctgtggtgaatgtgtcccttgcctaacaggaaaatctcatgtgtgtaccaatactgctataatcggagtggacacggcaggctgttttgcggagtatgtaaaagttccagctgataacatttggagaaatcccgctgatatggacccgtcgattgcttccattcaagagcctttaggaaatgcagttcataccgtactcgagagccagcctgcaggaggaacgactgcagtcattggatgcggaccgattggtcttatggctgttgcggttgcaaaagcagcaggagcttctcaggtgatagcgattgataagaatgaatacaggctgaggcttgcaaaacaaatgggagcgacttgtactgtttctattgaaaaagaagacccgctcaaaattgtaagcgctttaacgagtggagaaggagcagatcttgtttgtgagatgtcgggccatccctcagcgattgcccaaggtcttgcgatggctgcgaatggcggaagatttcatattctcagcttgccggaacatccggtgacaattgatttgacgaataaagtggtatttaaagggcttaccatccaaggaatcacaggaagaaaaatgttttcaacatggcgccaggtgtctcagttgatcagttcaaacatgatcgatcttgcacctgttattacccatcagtttccattagaggagtttgaaaaaggtttcgaactgatgagaagcgggcagtgcggaaaagtaattttaattccataaagggggataaacatgacgaaggaatttgagtttttaaaagcagagcttaatagtatgaaagaaaaccatacatggcaagacataaaacagcttgaatctatgcagggcccatctgtcacagtgaatcaccaaaaagtcattcagctatcttctaataattacctcggattcacttcacatcctagactcatcaacgccgcacaggaggccgttcagcagtatggagccggcaccggatcagtgagaacgattgcgggtacatttacaatgcatcaagagcttgagaaaaagctggcagcctttaaaaaaacggaggcggcacttgtattccaatcaggcttcacaacaaaccaaggcgtactttcaagtattctatcaaaagaggacattgtcatctcagatgaattgaaccatgcctctattattgacggaattcgactgacaaaggcggataaaaaggtgtatcagcacgtcaatatgagtgatttagagcgggtgctgagaaagtcaatgaattatcggatgcgtctgattgtgacagacggcgtattttccatggatggcaacatagctcctctgcctgatattgtagagctcgctgagaaatatgacgcatttgtgatggtggatgacgcccatgcatccggagtacttggcgaaaacggcaggggaacggtgaatcacttcggtcttgacggcagagtgcatattcaggtcggaacattaagcaaggcaatcggagtgctcggcggctacgctgcaggttcaaaggtgctgatcgattatttgcgccataaaggccgtccatttttattcagcacatctcatccgccggcagtcactgcagcttgtatggaagcgattgatgtcttgcttgaagagccggagcatatggagcgcttgtgggagaatactgcctattttaaagcaatgcttgtgaaaatgggtctgactctcacgaagagtgaaacgccgattcttcctattttaataggtgatgaaggtgtggcaaagcaattttcagatcagctcctttctcgcggtgtttttgcccaaagtatcgttttcccgactgtagcaaagggaaaagccagaattcgcacgattataacagcagagcacaccaaagatgaactggatcaggcgcttgatgtcatcgaaaagacggcaaaggagctccagctattgtaacaagaggaagagtttactcttcctcttttgattccttattgattattattctcaatgagtgtacaatgataggttgccagttgtgcagagcttcaataacctttatactgaagggtggaagtttggtttgaaaggagaaaatatgacatgaatgaaaaacaaaaattagagagcggacaagttcatccatcggacaaaaaatccgagaaggattacagcaagtactttgaagctgtttacattccgccttctttaaaagacgcgaaaaaacgaggcaaggaagccgttacttatcataatgactttaaaatttctgaacaatttaaaggattgggagacggaagaaagttctatatccgtacgtacggctgccaaatgaatgaacacgatacagaggttatggcagggatctttatggcgctcggttacgaagcgacaaactctgttgacgatgccaatgtcattttgttaaatacatgtgcaatccgtgaaaatgctgaaaacaaggtgtttggtgagctcgggcacttaaaagcactgaaaaaaaacaatcccgatctgattttaggcgtgtgcggctgtatgtcccaagaggaatcagtcgtgaaccgtattttgaaaaaacatccgtttgtcgatatgattttcggaacgcataacattcatcgcctgccggagcttttgtcagaagcatacctttcaaaagaaatggttgtagaagtttggtctaaggaaggggacgttattgaaaaccttccaaaagtccgaaatggaaaaattaagggctgggtcaatatcatgtacggctgtgacaaattctgtacgtattgcattgtgccttacacacgcggaaaagaaagaagccgccgccctgaggatatcattcaggaagtgagaaggctcgcaagtgaaggctataaggaaattactctgttaggccaaaacgtaaacgcgtatggaaaagactttgaagatatgacgtacggacttggtgatttgatggatgaactgagaaaaatcgatatcccgagaatccgttttacaacgagtcatccgcgcgactttgacgaccgcctcattgaagtgctggcaaaaggcggaaatctgcttgatcacattcatcttccggttcaatcaggaagctcagaagttctcaagctgatggcccgcaaatatgacagagagcgttacatggagctggtgcgaaaaattaaagaagcaatgccaaacgcttctttgacaacggacattatcgtcggatttccaaatgaaacggacgaacagtttgaagaaacgctttctctataccgtgaagtggagtttgacagcgcctatacgttcatttactctccgcgtgaaggcactccggctgctaagatgaaagataatgtaccgatgcgtgtgaaaaaagaacgcctgcagcgtctaaacgcactggtgaatgaaatttctgctaaaaaaatgaaggaatacgaaggcaaggttgtcgaagtattagttgagggtgaaagcaaaaataaccctgatattcttgctggctatactgaaaaaagcaagcttgtcaatttcaaagggccgaaggaagccatcggcaaaatcgtccgcgtgaaaatccagcaagcgaaaacatggtcgcttgacggagaaatggtaggagaagcaatcgaggtgaaatgagatgacgctctactcaaaaaaagacattgtgcagcaggctcgaaaccttgcaaaaatgatttctgaaacagaagaggttgattttttcaaacgggctgaagcgcaaatcaatgagaatgacaaagtgtccacaatcgttaatcagattaaagccctgcaaaagcaggctgtcaatctgaagcattatgaaaagcatgaagcgctcaaacaagtagaagcaaaaattgacgcgctgcaagaagagcttgaagagattcctgttatccaggaattcagagactcgcaaatggaagtaaatgacctactgcagctcgttgcacacaccatttccaaccaagtcacaaatgaaatcatcacatcaaccggaggcgacctgctgaaaggggaaaccggttcaaaggtgaagcattcaaataacagctgttctctctaaacacggtgcctttacaggcccgtgtttttttatcatttgtgcggttaaaaatgaactaaataatctatgtaccaaatgttcaattggtttttctgtgctcagccgcgtataaactttatcgcacttataagtaaagtttctaggcacccctgcatacaatggaacagaaactttgtatttttatattttatttataaaaatgcacactagacaaatgcccagcataagataacacgaagaagaacaaggaggcatgccggaatgtctgaatacagggaaattattacgaaggcagtagtagcgaaaggccgaaaattcacccaatgcaccaacaccatctcgcctgagaaaaaaccgagcagcattttgggtggttggattattaaccacaagtatgacgctgaaaaaattggaaaaacggtagaaattgaagggtattatgatataaacgtatggtactcttacgcggacaacacaaagacagaggttgtcacagaacgggtaaaatatgtagatgtcattaaactcagatacagagacaataattacttagatgatgagcatgaagtgattgccaaagtgcttcagcagccaaactgccttgaagtgaccatttcgccgaatggaaataaaatcgttgtgcaggcagaaagagaatttttggcggaagtggtaggggaaacaaaggtagttgttgaggtcaatcctgactgggaagaggatgacgaggaagattgggaagatgagcttgatgaagagcttgaagacatcaacccggagtttttagtgggagatcctgaagaataaaaaagggactaggggagacagtacccccaagtctcttttttatattgatatatcattcttttatcactttttgtttatgttataatgaaggttggaaaatagaaacgttgatacatagtgagggattaaacaatggccggttatacgcctatgatacagcaatatttaaaaataaaggcagagcaccaggatgcctttttattttttcgcctgggtgatttttatgaaatgttttttgaggacgccaaaaaagcgtcacaagagctggaaattacgttaacgagcagagacggcggtgcggctgaaaaaataccgatgtgcggtgtgccgtatcattctgcttccgcgtatatcgaacagcttattaaaaaaggatacaaagtggcgatctgtgaacagacggaagatccgaaagccgcaaagggcgttgtgaaaagagaagtagttcagctgattacgcccggaactgtaatggacggcaaaggcatccatgagtcggaaaataattttatcgcatctgtttcagcctgctcgaacggatacggacttgctctgtctgatttaacaacgggagaaaatttggctgttttgattgaacggcttgaagacgtcatatcagaaatttattcagtcggcgcacgggaaatcgtggtttcaggaagcttggatgccgatacagtggcacagctgagagagcggtgcggtgcaacgatttcaattgaagacggagaaacagacgaacacgtaacgatcattgagcacttaaataatgaagatataacaaaaacatttctgcgcttatatacgtatttgaaaagaacccaaaagcgcagccttgatcatcttcagcccgtgcaggtgtatgagcttgaggaagcgatgaaaattgacttgtactcaaagcgtaatctggagctgaccgaaacgattcgttcgaaaaataaaaaaggctcccttttgtggctgctggatgaaacaaaaacggcaatgggaggccggctacttaaacagtggattgaccggccgcttatcagagtcaatcaaatcgaagagcgccaagaaatggtggaaacattaatgtcccatttctttgaacgggaagatctgcgtgaacgtttaaaagaagtatatgacttagaacgccttgccggccgcgttgcattcggaaatgtcaatgcccgggatttgattcagctgaaggaatcgttaaagcaagtgcctggcatcaaacagctggttgcttcactggctcatgacaaggccaaggaacgtgcaaagcgcattgacccttgcggggatgtacttgaactgctggaagaagcgctgtacgaaaaccctcctttatcggtaaaagaagggaacctgattaaagatggttataatcaaaagcttgatgaatatcgtgatgcaagcagaaacggaaaagactggattgcccgcctggaacagcaggagcgggaatacacaggcattcgctctttaaaggtcggctttaataaagttttcggttattacattgaagtgacaaaagcaaacttgcatttgcttgaggaagggcgttatgagcggaagcagacgttaaccaatgcagagcgctacattacacctgaattaaaagaaaaagaagcgctcattttagaggcggaaaataacatctgtgagctggagtacgagctgtttaccgagctgcgcgagaaagtgaagcagtatattccgcggctgcagcagcttgcaaaacagatgagcgagctggacgcactgcaatgctttgcgacaatcagtgaaaatcgccactacacgaaaccagagttctctaaagatgaagtcgaagtgattgaaggcagacacccggttgttgaaaaagtcatggacagccaggaatatgtcccgaacaactgtatgatgggcgataacagacaaatgcttctcattacaggtccaaacatgtcagggaaaagcacgtatatgagacaaatcgcgctcatttccattatggcgcaaatcggctgctttgtacccgcgaaaaaagcggtgctcccgattttcgatcaaatttttacgcgaatcggcgctgcagatgatttgatttccggacaaagtacatttatggtagaaatgcttgaagcgaaaaatgcgattgtcaatgcgacgaaaaacagcctcattctgtttgatgaaatcgggcggggaacgtccacttatgacggcatggcgctggcacaggcgattattgaatatgttcacgatcatatcggcgccaagacgctgttcagcacacactatcacgagctgaccgttcttgaggacaagctgccccagctgaaaaacgttcatgttcgcgctgaagaatataacggaacggttgtctttcttcatcaaattaaagaaggtgcggctgataaaagctatggtatccatgtagctcagcttgccgaactgccgggagatctgattgcgcgcgctcaagatattttaaaagagcttgagcattcaggaaacaaaccggaagtgccggtgcagaaacctcaggtgaaagaagagccggcacagctgtccttttttgacgaagcggaaaagccggctgaaacaccaaagctttcaaaaaaagaaaagcaagtgatcgatgctttcaaatcacttaatatactggatatgacaccgcttgaagcgatgaatgaaatgtacaagctgcaaaagaaattacattaaaacggggtgatgaatgtggcaaaagtcatccaactgtcagatgagctttcaaataaaatagcggcgggcgaggttgtggaacggcccgcctcagtcgtcaaagaattggtggaaaatgcgatcgacgctgacagcacagtcattgaaatcgatattgaggaagcaggccttgcatccattcgggtcttggataacggcgaaggaatggagaatgaagattgcaagcgagctttccggcgccacgcaacgagtaaaataaaagatgaaaatgatttattcagggtgagaacgctcggtttcaggggagaagccctgccgagtatcgcgtcagtctctcatctggagattacaacaagcactggtgaaggagctgggacgaagctcgtcctccaaggaggaaacatcatttccgaatcgcgttcctcaagcaggaagggaactgaaattgtcgtttccaacctgttttttaacacaccggcccgtttgaaatatatgaaaaccgttcatacagagcttggaaacattacagatgtggttaaccgtattgctctggcgcatccagaggtatcgatccgcctgcgccatcatgggaaaaacctgcttcaaacgaacggaaacggagatgtgcgccatgtactggcagcgatttacggcacggctgtcgccaaaaaaatgcttccgctgcatgtgagctccttggattttgaagtaaagggatatatcgccctcccagagattacacgggcgtcgagaaactatatgtcgtctgtggtcaatggccgttacattaaaaatttcccgctcgtcaaagcggttcatgaaggctatcatacgcttctgccgatcggacgccatccgattacttttatagaaattacgatggacccgattttagtcgatgtcaacgtgcatccatcgaagcttgaggtccggctcagcaaggaaacagagcttcatgacttaatacgtgacggaattaaagatgtgtttaaacagcagcagctgattcctagtgcccaggtcccgaaaaaatcagcacctgccatcaaaaatgagcagcagtttataacctttgatgaaaagcctccggaaaaaaaagttccggaaaaatcgactgcgccatcttattcaccgatgaagctcagctcagtcgtaaaagagccggttgatgcggaggaaaaattgccccctctccaatttgatgctcctcctatcgttgatcaggaacaaacccttgaggtgtccgatgtttcagcagaacagcctgaaacatttgagcaggaatgccatgaggaacagccgcagccagcgtctgatcgggttccaattatgtacccgattggccagatgcacgggacttatatattggcacaaaacgaaaacggcctatatattatcgaccagcacgccgcccaagaacgtattaaatatgagtacttccgtgaaaaggtgggggaggttgagcctgaggtgcaggagatgattgtaccgctgacgttccactactccacaaatgaggctttgattattgaacagcacaaacaagagctcgaaagcgtcggtgtctttttagagtcattcggctctaacagttacatcgtccgctgccacccagcctggtttccaaagggagaagaagcagagcttatagaagaaatcattcagcaggtgctcgactccaaaaatatagatattaaaaaacttcgcgaggaagcggcgattatgatgagctgcaaaggctccatcaaagcaaatcgccacctcagaaacgacgaaatcaaagcgcttctggacgacctccgaagcacatcagacccatttacatgcccgcacggccgcccgatcatcattcaccactcgacatatgagatggaaaagatgttcaaacgcgtgatgtagcgggggtggtaggcattgatccattctctgaatggatcaatgctttttttgtactccttcgagtgtcagattataagaaacggttgtaaacgtgtgagcagtgttaacgcattatacttcatggttcctccgtataacaaaatttccatttacaggcaattgggattaatgtatattttgggtgagggggtggaaacatatggcatgtggtccgaagatcattatctttttggatgaacttgatgatccaaatgtgagaatcattttagaatgcagaatttaaattacaacattgtgttttgctccctgttcgtgtgaacagggagattttttcgtttatataactggtgatgtccaaatatagggtgttatgaattttccatatctgccatcggctttaagctgcttctctattaggctggttatcaaaagcaagttcaatgatagccatgaaagctgatatcacaacaagcaagacatctggaatataaatagactgcataaagtaatctgcaaaacagatcgttataagattgctgataaaatacagtataaaagcaaaaagtgcagtctttttcaatgaaagtgattttgccaaaatgatagagataatctttgtgagtgggtctatgattaaacctacagcaaagcaggctaaaataaataaagctaatgtttgattggaagcgtatgtgatgccaagtatggagaataagcctttcatcccgaagaaaaagccgccgaagatgactgcaagcgcgatggccgcgataaaagtaatagatacaattccgattaattttgatctcaggttaaaatctttagagtgctcgttctgttctttttggttcatgtatgacactcccttcacctgcttactcatacaaacagcacccttgaatcagcccaaaatatctataagtctgttttctgacgaaaatagtatagcatattttaacaaaaccaaaaaaggccctttccactggggaagggcctttttcatcatgttaactcctgagattcgccgaagctttctctttttttggccaaataaaatagctggctgtaatgagaaagtcaatgcctataatgacagtccacagtttaagaatgccgctcaacgcctcggttcgggaagagtcattgataaaatagatcatccctgccaatagtcccgcaccaattaagtaggccagcacatgtcttagccagcctttcgcaccgtgcttggcatggtccattccaaaacgtttcagcggttttgttcctttttttgtcacataatattgaaacttttcatctgcccattgaatcatttgtttcccataagcgatcgatataccgatgtaaacagctgcaatcccatgggctgcggtcgctgaggctccgcggtaaaggtccacaccagttgccgctaacaagatcaaatcgataactggagttaaggcaaggaatagcagtcctaatgtatgtcgtttgaatacgtagcgtacagcaagccccaaaacaatgacaacccaaaacgcaatttcacagaaaacaatcatccatgcgataccgttcaatccattcccctcttttcaatacagttgtattatttaaataatatgttaccatctttgtttttgtaacacaactgtattataaaaattgccctctcatttttttcttgttacaataaagctatgccaaaacaaattgaccatgagaaaagaagaaaacaaattgcagaagcaacgtggcgcgtcattttagaacgagggatggagggagcatcagccagaaatattgcaaaggaagcaggattgtcattaggtgcgctgcgccattatttctctacacaggatgaattgcttgcttttgcaatgaaacttgtccaagaaaaggtaacggaccgaattaaggacattgcagtgagggatttgctccctaaggaaaaagtgttgcaaattttgcttgaaatggtcccaacgaatgaagaaacgattagagagatggaggtttggtttgcttttactgcttacgccagacataaaaaggatatgtttgatgcgagtcatgacgggattttcagcggcatgcggaatctgattgcctatttagatgaatccgatttactgaagcagaatgctgataaagacattgaagctgagagactttacgcgcttgttgacggcttggctttacatgccatgcttgaccctgtgcgcgtgaataaagaccgaatcaagcgggtcattatgcagcatgtagagtcaatttgcgtggaagatacacgtgagacacaaaaacgacatccttaaggcactagtgtgaaaagcgattcttgttgggcatgcgtccaaaagagtcgcttttttattttcaaagaacaaggatctctgaaaaaaatggaaaacaatcatgctgtttggtaaagtggaatgaaagacggactgaggggtgaacactggtccatcgtttaagaactttacatgatagggatggtataaatgaatcttacttacaaggtgcatccaattaaaacaaggtatcagggctggacgaattattgctatatcattgaagatattgtaagcagatctgcaattgttgttgatccctcatgggaattgagtaagataaccactacactttccgaactcgaagcggaattaaaggcagtcgcattgacacactctcattatgatcatgtaaatctggtagacccgctgacgaagatgtttaacgctcaagtttatatgtcgaaaaaagaaattgattattatcaattccgatgcagaaatttaattagcctagatgatcatcagacgatcagcataggaaacacaagagcacagtgccttctcacaccggggcatacagccggcggaatgtgttatttgttttctgagagtatttttaccggagatacggtgtttacagaagggtgcggcatatgtgaggatgatggcagctctgcggaagagatgtttgatagcattcaaagaataaagtcggaggtttcaccccatgtacgggtgtatcctggtcactcatttggcaaatcgcccggccattcgataaaggatctttatcagcataatatttactttcaaattgataagaaagaatattttgtgaaatttcgcactcgtaaaaaccaaaaaggtatttttgattttaaataatccttctgaatctattatcctatttttcttcgaatatctaaatgatttttattttcgaaaatgattacatagaaggtgttatttattttgaaaactcatttgaaagaaaatgaagcgcattatcatgatatggcgccctatatgtaatccgggtcttttttcttatgttctgttatatctcctgatcctttattcctcaatggaaaaaagcagaaaaacaatggagcaaactgtaggaaaaattaacttgacggataatatttacagaggttaccatcaacatgaacatgctactatttatccggtcatcactattataaaatcatacagaagtgaaacacatctactaatcggaagggtggctttgagagaatgatcacatatgtttttccaggtcagggttcacaaaaacagggaatgggcagcggcctattcgatgaatttaaagaactgacggatcaggcagatgagatcttaggatattctatcaaacgtctttgcctggaaaatccttattccaatttaaacaaaacgcaatttactcagccggcattatatgtggtaaacgcactaagctatctgaaaaaaatcagggatgaagaagttaaacctgactttgtcgccgggcacagcttgggtgaatacaatgcgttatttgcagctgaagcctttgattttgagacaggtttacagcttgtcagaaaaagaggcgagctgatgagtctgataagcaacggcggtatggcagctgttatgggactaaatgaagagcaggttgcaaaggctctgaaagaatatcatttacatgatgttgatatcgctaatgtgaatgccccatatcaaattgtaatttcaggaaaaaaagatgagattgaaaaagccgcatctctttttgaaacgatgactgaagttacaatggtactccccttaaacgtaagcggcgcgtttcattccagatacatgaataaagcaaaagaagaattcgaggagttccttcatgccttttatttttcgcctccgtctatcccggttatttctaatgtgtatgccaaaccgtatacatacgaattcatgaaacagacgctggctgatcaaattaatcattcagtgaaatggactgacagcataagctacttaatgaaaaaaggccatatggagtttgaggaggtagggcctggaaatgttttaactgggttaattcatcgcataaagaaagatgcggaagcaatgccccgctaaagcatttgcccctatggccatgtatctcatcaatcaggtctaaacacagatttcctttcatttaaggtataaagttttaaagattcaatcgttcgattgacactgtttctaattgaataactttatatactgttacataaagaggctgataaattaagttagacatttgaactatgtcagccggtctgtcaaaccatcgctcccacatctagatggtccatttttaaaccgcacccaccaatcatagagtcgatgttctttgctgatcctgttatcatgttacatcaattttgagatatcaacatacatctacgatcacgtcataaatgaaccacatccagagcaccaatagcaatccttccaagttgaatctcctttactttttcacatatgtcttttccatttattaatttcatttcaatcgctgctatgtgctttaacaacatgcatggaaatgagaaatccaatagccgtcataaatataaaaaaagaaggttatacacatgaatgaaccgcttgtttttatgttttccgggcaaggttcccaatactatcacatggggaaagaactatttaaggaaaataccgtgtttcgccaatcaatgcttgaaatggatgccattgcagcacggcgaatcggcacatccattgttgaagaaatctaccatccaggtaaacgtgtgtcagatccgtttgacagtattcttttttcccaccccgccatttttatgattgagtattccttatataaggttttggaagacaggggaatttatcctgattacgtattgggatcaagtctgggagaattcgcagcagcggcagtttctggtgtgtcagacgcagaggatatgctggattgcatacttgaacaggctattatcatccagaattcctgcgataaaggaaaaatgctggccattcttgacaaaccgcaattgctgaatgatcatccgcaactgtttggaaatagtgaactcatttctatcaattatgattcgcacttcgtcatttctggtgaagaagatcatataaggaagattatggaggatttaaaggagaagcagattctttgccagctgcttcctgtgtcctatgcctttcattcttcgcttattgatccggcagagagtgcctatgcagaatttttaagatcaaaatcttttcaaaaaccgtcaataccgattgtatcgagcttaacgggaagctgccttcacgtaatggacgagaatttcttttggaatgcggtcagaaagccaatgatgtttcgtgaagcgattcgatatttggaaagccagcatacatgcaagtttatcgatttagggccatccggcaccttagctgcttttgtgaaacagctgattccgggtgattcagctgaccgttgctgctcaatcataacaccatttcatcaggagctgaaaaatctgaatacggttgagtatttccgtacaccagaaaggaagtttacaagatgattacatatgtctttccagggcaaggctcccagcaaaaggggatgggacaagggctatttgaacagtatcagcatttgacagatcaagcagatcaaatattgggctattcaatagagaagctatgtaccgaaaaatcatatctggatgtaaatcatactgaatacacgcagccggctttgtatgttgttaatgcactcagttacttgaagagagtggaggagaccggcagaaaacctgattttgcggcaggacacagcttaggagaatacaatgcgctgatggcagccggtgcatttgattttgaaaccggattaaggctcgtcaaaaaaagaggagaattgatgggacgaattacagggggcggaatggctgctgtgatcggcctgagtaaggaacaagttacagccgttttagaagagcaccgtctttatgacattgatgtggcaaatgaaaatacgccccagcaaattgtgatttctggcccgaaaaaagagattgaaaaagctcgggctgtttttgaaaacaccaaggatgtaaagctgtttcatccattaaatgtgagcggagcttttcattccagatatatgaatgaagccaaacaggtatttaagcaatatattgactcattccagtttgcacctttggcgatcccggttatctccaatgtctacgcagagccataccatcaagacagattaaaagatacattatctgaacaaatggacaacacagtgaaatggacggacagcattcgttttctgatgggaagaggagaaatggagtttgcagagattgggcctggaactgttttaaccggtctcattcatcggattaaaaatgaagctgaaccattgacatatataccgaaaaagaaccccgcgatcagtgcgcatctaaaggagcaacgcaatgttcaagccgggattacggcagaatctttaggaagtgctgaatttaaacaagattatcatcttacatatgcttatcttgcaggaggaatgtaccgcggcattgcttcgaaagaaatggtagtaaagctgtcaagagcgggaatgatggggttctttggcacaggaggtctgagcctgaaagaggttgaagatgcgatccatgctatacaaggtgaattaggaaaaggacaagcctacggcatcaatctggtccacaatatgaaacatactgaatcagaagaaaaaatgatcgatcttttattgaggaatcaagtgagcattgtggaggcttcagcatttttaagtgtcactcctgtattagtaaggtatcgcgcaaaaggagtgaaacgaaatcaaaatggtgacgttatatgctcaaatcgtctcatagcaaaaatatcacggccggaagttgcagaatcatttctgagtcctgcgcctgagaatatgctgcaaaagcttttaggagaaaataaaatcactatgaacgaagctgagttgttgcggtgcattccgatggctgacgatatttgtgtagaagctgattcaggcggtcatacagatggcggtgtggcatacagcctgatgccggcgatgacatctttaagagatgaaatgatgaaaaaatatcaataccggaaaaaaataagagttggtgcagctggaggaattggaacacctgaggcagcgatggcggcttttatgctaggggctgattttattctaacaggctcaatcaatcaatgtacggttgaggcggcaacaagtgataaagtaaaggatttgcttcagcagatgaatgtacaagatacagcctatgcgcctgcaggtgatatgtttgaatcgggcagtaaagtgcaggtgctaaagaaaggcgtgttctttcccgcacgggcaaacaagttatatgaactgtatcagcggtatgggtctatacgtgagctggatgcaaagatgctggcccagcttgaggagaaatactttaaacgcagtatagaagacatatataaagatattgcattgcattatcccgcggcagacattgagaaggctgaacaaaacccgaagcataaaatggctttgattttccgatggtacttcagatacagttcaaaattggcaatcagcggaagcgaacattcgaaggtcgattatcaaattcactgcggtcccgcgctgggagcctttaatcaatgggttaaagggtcgcaattagaaaattggcgaaaccgccatgtggatgaaatcgggaaaaaattaatgacagaaacggcagtattgcttcatgaacggatgcaatcgatgtatcagccgtcgcatgaaacagacaacataaaaataaaagtttgaatattatgaaaatatacctataaaaatcattaaaataatcccttgaaggagagagcgcattatggataaacagagaatctttgaagtattaatcaccaatatttgcgaggtgcttcctgaattagacggacacagatttgagcctgaagatcagttagttgagctaggagctgactctgtagacagagctgaaattatcacgatggtgctagaggatttatcgttaaaaatccctcgcattgagctatccggggtgaaaaacatcggtgaattagctgaggtgctttatgacaaagtgcaatctgcctgaggtggtggtgaccggtgtaggcgttacggcctctatcggtcaagggaaagaggactttgcttcctcgctgctgtccggcagacatgcctttgatgtcatgaagcgttcaggcagacaaaaagacagccggtttatcggagccgaaattgcgtcattgtcttatcctgaccgactctctaaaaaaatgttgcgaaaagcatcattctccagccgcgctgcattggtaactctcacagaggcttgggaggaggctgaattggacgatgcagattcctcacgtatcggactggttgttggcggatcaaattttcaacagagagaaaactttgaagtttatgaaaggtatcaagaccgctccggttttatttctccggcgtatggtctgtctttcatggacagcgatctttgcgggatatgtacagatcagtttggcatcacgggattagcatatacggtgggaggagcttcggccagcggccagttagcagtcattcatgcgattcagcaagtcctgtcaggcgaagttgatacttgcatagcacttggtgctttaatggatctttcttatatggaatgcgaggcgctaagggctttaggcgctatggggacggacaaatatgctgatgaacctgaaaatgcgtgccgtcccttcgatcaaaacagagacgggtttatctatggagaatcgtgcggtgcattggtaatagaacgaaaggagacggctttacgaagaggtctaaaaccttatgcagcattgtctggctggtcaatcaaactggacggaaaccggaatcctgatccttcattagaaggagagattcatgtcatccagaaggcactggagcgtgccaggcttttaccagaagatattgattatattaatcctcatggaacaggctcttttattggagatgaaatagaattaaaggcgctccgtgcatgccggctttcccatgcttatatcaatgcaacaaaatcgataaccggacacgggcttagtgcggcgggcatcgtagagattatttctgttttgctgcaaatgaaaaaatctgccctgcatccgagcaggaatttggatcatccaatcgatgattcctttcattgggtaaatgagaaatcgatttcataccgcatcaaaaatgcgctgagcttaagcatggggtttggcggaatgaacaccgcggtttgtatacaaaacattgagaaatgtggaggcgaatcataaatggtttcagccggaatagaagcgatgaatgtctttggcggaacggcataccttgatgtcatggagctggccaaatacagacacttagatactgcgagatttgaaaatttattaatgaaagaaaaagcggtagcactgccttatgaagatcccgtgaccttcggagtcaatgcagctaagccgattattgatgctttatctgaagcagagaaggaccggattgaattgctgatcacttgctctgaatccgggatcgactttgggaaatcgttaagtacatatatccatgaatatttaggtctcaaccgcaactgccgtttgtttgaggttaaacaggcgtgttattcagggacagcgggatttcagatggcggtgaattttatattatcccagacttctccgggtgccaaagcactggttatcgccagtgatatttcacgttttttaatcgctgagggcggagacgctttaagcgaagattggtcttatgcggaaccgagcgccggagcgggagcggtggccgttttagttggcgaaaatcccgaggtgtttcaaatagatcccggagcaaatggttattacggctatgaagtgatggacacgtgccgccccattcccgacagtgaagcgggagattctgatctgtctttaatgtcatatttggattgctgcgaacagacttttctggaatatcaaaagcgtgtaccgggtgccaattatcaggacacgtttcaatatcttgcttaccatacgccctttggcgggatggtgaaaggtgcgcaccggacaatgatgcgtaaggtagcgaaggtgaaaacatccgggattgagacggattttttaactcgggtaaaaccaggtttaaactactgtcaacgggttggaaatattatgggggcagccttgtttctggcattggccagcacgatagaccaagggagatttgatacgcctaaacgaattggctgtttttcctacggatccggctgctgttctgaattttacagcggaattacaactccgcaaggccaggagcgtcagcgaacatttggtattgagaagcatttggatcgccggtatcagctctccatggaagagtatgagctattgtttaaggggagcgggatggtgcggtttgggacgcgcaatgtaaagctggactttgagatgataccgggcatcatgcagtccactcaagagaagccgcgcttgtttttagaagaaatttctgagtttcatcggaagtacaggtggatctcgtgacctatcaaacgataaaggtccgctttcaagcatcggtttgctatattacctttcaccgtcctgaagcgaataatacgattaatgacacgctgatagaagaatgcttgcaagtgttaaaccaatgtgaaacatcaacggtgacggttgtcgttttagaggggcttcccgaggtgttttgtttcggagcggattttcaagaaatctatcaggaaatgaaaaggggcagaaaacaggcaagctcccaagagcctctctatgatttgtggatgaaattgcagaccggcccttatgtcacgatttcgcatgtcaggggaaaagtgaatgccggcggtcttggatttgtatctgccacagatattgccattgctgatcagacggcgtcattcagtctctctgagctgctattcggcctgtaccctgcttgtgttttaccgtttctgatccgccgtatcggccggcagaaagcgcattatatgacgcttatgacaaagccgatttccgttcaggaagccagtgaatgggggttaatagatgcttttgatgctgaaagtgacgtgctgctgagaaagcatttattgcgtttgcggaggctgaataaaaaaggaatcgcacattataaacagtttatgagctcacttgatcatcaagtcagtcgtgcgaaagccaccgctttaactgcaaatcaagacatgttttctgatcctcaaaaccaaatgggaatcatcaggtatgttgaaacaggacaattcccatgggaggatcagtaaccgtttaaaaatgacaatcagaaccgttaggaggacatcatgacgcattctgttgtagagcttatcgaaattgaatccgccattattcaggtaaagatgcaagatcgcactcataaaaacgcgttttcacaagaacttacagacgatttaattcaagcgtttgaatacatacggcagaatcccaaatacaaagcggtcattttgacaggatatgataattattttgcttcaggaggaacgcaagaaggactgcttcgaattcaacagggattgaccaagttcactgatgacaatctttattctctggcgctggattgcgagattccagttattgcggcaatgcagggccatggaattggaggcggctttgtcatggggctctttgctgacattgtcattctgagcagagaaagcgtgtatacggctaattttatgaaatacggatttacgcctggaatgggcgctacctttatcgttcctaaaaaactgggtttcagcctggcccaggaaatattattgaatgcgggcagctaccgcggagctgatcttgaaaaaagaggggttccttttaaggtgctgccccgtgcagaagtgttagattatgcagtggagctggcgcaagaactggcggaaaagccgagaaactcactggttacactgaaagatcatttggttgccccgcttcgcgatcagctgccgcgcgtcattgaacaggaattgatgatgcatgagaaaacatttcatcatgaagaagtcaaaagtagaatcaaaggtttatatggtaattaactgaaaatatatataaattttgcaggtgaaatggaggcagcgtgatgagaaataatgataatatccgcatattaactaatccttctgtcagtcatggggagcctttacatatatctgaaaagcagccggcaacaatacctgaagttttatacagaacggcgacggagcttggggatacaaagggaatcatttatttgcagccggatggaactgaagtttaccaatcatacagacgattatgggatgatggattgcgcattgcgaaggggcttcgccaatcaggcctgaaagcaaaacaaagcgtgattttgcagcttggtgacaattcacagcttctccctgcgttctgggggtgtgtgttaacaggggttgttccggctccattagccgttccgccaacgtatgctgaatcgagcagcggcactcaaaagctgaaagacgcatggacgcttcttgataagccagcggtgattacggaccgggggatgcatcaggaaatgctcgattgggcaaaagaacaagggcttgaagggttcagggcaattattgtagaggatctgctcagcgctgaagcggacacagattggcatcaatccagtcctgaagacttagcgcttttattgctgacttcaggcagtacgggaacgcccaaagcagttatgcttaatcatcgtaacattatgagcatggtgaaagggattattcaaatgcaaggcttcaccagagaggatattacgtttaactggatgccgtttgaccatgtcggagggatcggaatgctgcatttgcgggatgtttatcttggctgtcaggaaattaacgtctcaagcgaaacgatcttaatggagccgttgaaatggctggattggattgatcattaccgagcttctgttacgtgggcgccgaattttgcgtttggtctggttactgattttgcagaagaaataaaagataagaaatgggatctgtcttcaatgcgatacatgctcaatggcggtgaagcaatggtagccaaggtagggcgtagaatacttgagcttttagaaccacatggactgcctgctgacgccatccgacctgcctggggaatgtccgaaacttcatcgggcgttattttttctcatgaatttacccgggctggaacaagtgatgatgatcattttgttgaaataggctctccaatccccggcttctctatgagaattgtgaatgaccataatgaattggttgaagagggtgagatcggccgttttcaagtctcgggtctttctgttactagcggttattaccagcggcctgatttgaatgagagtgtgtttacagaagacggctggtttgaaaccggagatcttggctttttgcgaaacgggcgcttaaccataacaggccgtacgaaagatgcaattatcattaacggcattaattattacagtcatgcaattgagtctgcagttgaagaattacctgaaattgaaacttcttatactgctgcttgcgctgtccgtctgggccagaattcaacagatcagctggctatcttctttgttacttccgcaaaattaaatgatgagcagatgtctcagcttcttagaaacatacaatcccatgtctcacaggtgatcggagtcaccccggaatatttgctgcctgtacaaaaagaagagattccaaaaacggctatcggaaagatccagcgcacccagctaaaaacttcatttgaaaatggagagttcgaccacttgctacataaacccaatcggatgaacgatgcagtccaggatgaggggatacagcaagcagaccaggtgaaaagagtaagggaagaaatacagaagcatctgctcacctgtttgactgaggagctgcacgtttcccacgattgggtggagccaaatgcaaatatccaaagtcttggtgtgaattctatcaagatgatgaagctcattcgatcgatcgagaaaaactatcatatcaaactaacagctagagagatacatcaatatcctacaattgaacgcttagccagctatctatcagaacatgaagacctcagcagcttgtctgctgacaaaaagggcacggacacatataaaaccgaaccggaaaggagtcaggcaacttttcagcctctctctgaggttcaaaaaggattatggacattgcaaaaaatgtcacccgaaaaaagtgcatatcacgtacctctctgttttaaattttcgtcagggcttcaccatgaaacattccagcaggctttcggccttgtattgaatcagcacccaatcttaaagcacgtcatccaagagaaagacggagtgccatttcttaaaaatgagccagcactttcaattgaaatcaagacagaaaatatctcaagtttgaaagagtctgatattcctgcttttcttagaaagaaagtaaaggaaccgtatgtaaaggaaaacagcccgttagtgcgtgtcatgagcttttccagatctgaacaagagcattttttattagttgtcattcaccatttgatttttgacggagtttcgtctgtcacatttatacgcagtctgtttgatacctatcagcttcttttaaaaggacagcagccggaaaaagctgtttctcctgccatttatcatgattttgcggcatgggagaaaaacatgcttgccggcaaagacggtgtgaagcaccgtacatattggcagaaacagctatcgggaactttgccgaatcttcagctgcctaatgtcagcgcaagttcagtcgattctcagtttagagaggatacatacaccaggcggttgtccagcggcttcatgaatcaggtcagaacgtttgcgaaagagcattctgtaaatgtcacgacggtattcttaagctgctatatgatgctgcttggccgttacacaggccaaaaagaacagatcgtcggcatgccggccatggtgaggccggaagaaagatttgatgatgccattggacattttctcaatatgctcccgattcggagtgagctgaacccggcagacactttttctagctttatatcaaaattgcaattaacgatattggatgggcttgatcatgcagcatatccttttccaaaaatggtgagggatctgaatattcctcgcagtcaagcaggttcaccggtatttcaaaccgcttttttctatcagaattttcttcaatccggaagctatcaaagcttgctgagccgctatgctgacttcttttctgtcgatttcgttgagtatattcaccaagagggcgaatacgaattagtatttgaactgtgggaaacagaagaaaaaatggagctgaacatcaagtacaatactgggctgtttgatgcggcttctatatccgccatgttcgaccattttgtttatgtaacagagcaggcgatgttgaatccttctcagcctttaaaagagtattctttattacctgaggcagagaagcagatgattctcaaaacatggaacgccacaggaaaaacgtatccatatataacttttcatgagttgtttgagcagcaggcgaaaaagacgcctgatagagcggctgtcagctatgaaggtcaaacattgacgtatcgggagcttgatgagaaaagcacacagctggccatttatttgcaggcgcatggagtgggtcctgaccgtctggcggggatctatgtggatcgatcgctggacatgctagtgggtttattagcgatcctcaaggctgggggagcgtatgtgccgctagacccgtcctatccggctgaacgattagaatacatgcttgaggacagtgaagttttcattacactgacgacatcggaattagtaaatacgttgagttggaacggtgtcacaacagcccttttagatcaagattgggatgaaattgctcaaacagcctctgatcgaaaagtgcttacacgcactgtcacgccagagaacttggcatatgtcatttatacatccggcagcacaggaaagccaaaaggtgtcatgataccacataaagctttgacaaactttctcgtttcgatgggggaaacaccaggtcttacggcagaggataaaatgcttgctgtcacaacctactgttttgatattgcagctctggaattatttttgcctttaataaagggcgcacactgctatatttgtcaaacggagcatacaaaagacgttgaaaaactgaaacgggacatccgcgcgatcaaaccgacagtgatgcaggcaacccccgctacgtggaagatgctcttttattcaggctgggaaaatgaagagagcgtgaaaattttatgcggtggcgaagcattgcctgagacattaaaacgatatttcttagatacgggcagcgaagcctggaatatgttcgggccaaccgaaacaactatctggtcagcggttcagcgcattaacgttgaatgctctcatgccacgataggaaggccaatcgccaatacacaaatctatattacggattctcagctcgcgccagtgccggcaggtgttccgggtgagctgtgcattgcaggagacggtgtggcgaagggctactacaaaaaggaagaattaacggattcgagattcattgacaacccttttgagcctgggtctaagctttatagaacgggagacatggcccgttggcttacgggagggcgaattgaatatataggccgcatcgataatcaagtaaaaatccgcggattccgtattgaacttggtgatattgaaagcaggcttagtgagcatcccggcattctggaatgcgttgtggtcgcagatatggataacctagctgcctattatacagctaaacatgcaaatgcttctctcacagcgagagagctgcgtcattttgtgaaaaacgctttgcctgcctatatggtgccttcttattttattcagcttgatcatatgccgttaactccgaacggaaagatagatagaaacagccttaagaatatcgatttatcaggggagcagctaaagcaaaggcagacctctcctaagaacattcaggatactgtttttaccatttggcaggaagtgctgaaaacgagtgacattgaatgggatgacggatttttcgatgtgggcggggattcgcttctcgcggtcactgtggctgatcgtatcaaacatgaactatcctgtgagttttctgtcacagacctgtttgagtattcaacgattaaaaatatcagccagtacatcactgaacagcgaatgggcgatgcaagtgaccatataccgacagacccggcagctcatatagaagatcagtctaccgagatgagtgatctcccggactattatgacgatagtgtggcgattattggcatatcgtgtgaatttccaggggcaaaaaatcatgatgaattttgggagaacctcagagacggcaaggaaagcattgcgtttttcaataaagaagagcttcagcgctttggcatttcaaaggagatagcggagaatgccgactatgtccctgctaaagcttcaattgatgggaaagacagatttgatccaagcttctttcaaatctctcctaaagacgctgaatttatggaccctcagcttcggatgctgctgactcattcatggaaagcaatagaagatgccggttatgctgcgaggcagattccgcaaaccagtgtttttatgtcggcaagcaataattcttatcgcgcgctgctgccgtcagatacaacagagagcctggagacgccggacggctatgtttcgtgggtgcttgcacagagcgggacgattccgacaatgatttctcataagctcgggctgagagggccaagctattttgtccatgccaactgctcatcctctctgattggattgcattctgcctataagagcctcctgtcgggtgaatctgattatgctttagttggcggtgcaacgctgcataccgagtcaaatatcggatatgtgcatcagcctgggctgaacttttcgagtgatggacatattaaagcttttgacgcttcagctgacggaatgataggcggtgagggcgttgctgttgtattgctgaaaaaagcagctgatgcagtaaaggacggggatcatatctatgccttgctgagaggcattggtgtaaataacgacggcgctgacaaagtcggcttttatgctccaagcgttaaaggccaggctgacgtggtccaacaggtcatgaatcaaacgaaggtacagcctgaatccatctgctatgtagaagcacacgggaccggaacgaagctgggggacccgatcgagctggcggctttaacaaacgtttacaggcaatatacaaataaaacgcaattttgcggcattgggtcggtgaaaaccaatatcggacatttagatacagccgccggtcttgcgggctgcattaaggttgtgatgagtctttatcatcaagagcttgcaccgagtgtcaattataaggagccgaatccaaatacagacttagccagctctcctttttacgtcgtcgatcaaaagaaaacgttaagccgtgagatcaaaacgcacagggctgcacttagctcgttcgggcttggcgggacaaatacccatgccatttttgaacaattcaaaagggattcagataagggaaagatagacggaacctgcatcgtcccgatctcggcgaaaaataaagagaggctgcaagagtatgcagaagacattctggcctatttagaaagaagagggtttgagaacagccagctgcctgattttgcgtatacccttcaggtggggcgcgaagcgatggagcatcgcgttgtctttattgccgatcatgtaaatgagttaaaacagaggctcacagattttatcaatggaaatacagcgattgaaggctgttttcaaggaagtaagcacaatgccagagaggtttcatggctgacggaggatgaggacagcgctgaactcatacgtaagtggatggccaaaggaaaagtaaacaagcttgcagaaatgtggagcaagggagcgcatatagattggatgcagctttacaagggagagcgcccaaacagaatgagtctgccgacttatccatttgcaaaggaacgatactggccgtcgcaggatgaccgcaaaccggtggcgcagatatccggaaatcagacagggatcggctctattcatccattgcttcatcagaatacatctgatttttctgaacagaaattcagttcggttttcactggtgacgaatttttcctgagagaccatgtggtaagaggaaagcctgtgcttcctggtgttgcgtaccttgaaatggcgtacgcggctataaaccaggcggcaggaagtgaaattggccaagatgtcagaatcagattgaatcatacagtctgggttcagcctgttgtggttgacagacattcagctcaagtggatatcagtctctttcctgaagaagatggaaaaatcacctttgacatttacagtacacaggaagacggggacgaccctgttattcatagtcaaggcagtgcggagctggcatctgccgccgaaacgccagtcgcagatctcactgaaatgtcacgccgttgcggcaaaggaaagatgtcgcctgatcaattttacgaagaaggcagaagcagaggaatgttccatggtccggcctttcaaggaattaagaatgtgaatataggaaacagagaggttttggcgcagctgcagcttccagaaatcgtttctggaacgaatgaacagtttgtgctgcacccaagtatcatggattccgccttgcagacagcaacaatatgcatcatgcaggaattgacggatcaaaagctgattttgccatttgcgcttgaggagcttgaagtgatcaaagggtgttcttcttctatgtgggcttatgcccgcttaagtgacagcgatcactccggaggggttgttcagaaagcggatatcgatgtcattgacgagagtggaaccgtatgtgtcaggatcaaaggattttcaacgagagtattagaaggggaggttcatacttcaaagccttcaacacggcacgaacgcttaatgcttgaaccggtgtgggaaaaacagaatgaagaacgagaggacgaagatctttcgtacacggagcatatcattgttctcttcgaaactgaacgaagtgtcacagacagcattgcctcccacatgaaagatgcccgtgtgattactctaaacgaagctgtaggacatattgctgaacgttatcaatgttacatgcagaacatttttgaactcctgcaaagcaaggtccgtaagctttctgcaggccgtatcatcattcaagcgattgttccgctggaaaaagagaagcaattgtttgccggcgtttccggtctgtttaaaacagcagaaatagagttcagcaaactgactgctcaggtcatcgaaattgagaaacctgaagagatgatagaccttcacctcaagctgaaagacgacagccggagaccatttgacaaacagattcgatatgaggctggataccgttttgtgaaaggctggagggaaatggtgcttccttcagctgatacgcttcacatgccgtggagagacgagggtgtttatctaatcacaggcggagcaggaagcttaggccttctgtttgcaaaggaaattgccaatcgaactggccggtctactattgtgctgacgggacgatctgttttaagtgaggataaggaaaacgagctggaggctcttcgaagcatcggagcggaggttgtctatcgagaggctgatgtaagtgatcagcatgcggttcgtcatcttttggaggaaatcaaagaaagatatggcactctcaatggaattattcacggtgcaggcagcagtaaagatcgcttcatcattcataaaacgaatgaagagtttcaagaagtgttgcagccaaaagtgagcgggttgttacatgtagacgaatgcagcaaggatttcccattggactttttcattttcttctcttctgtttcgggatgtttaggaaacgctggacaagccgattatgcggcagccaattcgtttatggatgcatttgctgaataccgccgttctcttgcggcatcaaaaaagagattcggctccaccatttccttcaattggccgttatgggaagaaggcggtatgcaagtcggcgctgaagatgaaaagagaatgctgaaaacgacgggaatggtcccgatgccgacagatagtggcttgaaagcattttatcaagggatagtatctgataagccgcaagtttttgtgatggaaggacagcttcagaaaatgaagcaaaaactgctttccgcaggatcgaaagccaagcggaacgatcagagaaaggcggatcaggatcaaggacaaactagaaaattggaagcagccttaatccaaatggttggcgcaattttgaaagtaaacactgacgatatcgatgtcaacacagagctgagtgagtacggattcgactcagttacattcactgtctttacaaacaagatcaacgaaaaatttcaattggagctaacaccgaccatattctttgaatatggcagcgtccaaagcctggctgaatatgtagttgctgcgtatcagggcgaatggaatcaagatgctactgctaaaggcaaagatgaaagaacaaacttagtgcacagtttaagcagcctggaggcatcattaagcaacatggtcagtgcaattttaaaagtaaatagtgaagatattgatgtcaatacagagctgagtgaatacggatttgattcagttacatttacggtctttacaaacaagatcaacgaagaatttcagttggagctaacgccgaccattttctttgaatatggaagcctccacagcctggctgagtatttgaccgttgaacatggtgacaccctggttcaggagcgagaaaaaccagaggggcaggaagagttacagacaaaatcttctgaagcgccgaaaatcacatcacgtagaaagcgccgctttacacagcctattattgcaaaagcagaaagaaacaaaaagcaggctgccgattttgagccggttgcaattgtcggcatcagcggccggttccctggcgctatggatatagacgaattttggaaaaacctagaagaaggaaaagacagcatcacagaagttccaaaagatcgatgggattggcgggagcattatggaaacccagacactgacgtcaataaaaccgacatcaaatggggtgggtttattgatggtgtcgcagagtttgatccgttgttttttggtatttcgccgcgagaagctgattatgtagaccctcagcagcgcttgttaatgacatacgtgtggaaggcattggaagatgcgggttgctcgccgcaaagcctttcgggtacagggaccggtatctttatcggtacgggaaacaccggttataaagatctattccatagagcgaatcttccaattgaaggccatgctgctacaggtcatatgattccttcggtaggcccgaatagaatgagttattttttaaatattcatggtccgagcgagccagtagagacggcttgttccagttctcttgtagccattcaccgtgctgtgactgcgatgcaaaacggtgattgtgagatggcgatcgctggaggcgtgaatacgatcttaaccgaggaggcgcatattagctacagcaaggcggggatgctcagcacagacggcaggtgtaaaaccttctccgccgatgcgaatggctatgtcagaggcgaaggggtcggaatggtcatgttgaaaaagctggaagatgccgagcgcgacggaaatcatatttacggcgttattcggggcacggcggaaaatcacggcggaagagccaataccctgacatcgcctaatccgaaagcacaagctgatttgttggtgcgtgcatatcgccaagcagacatagatccaagcactgtcacatatatcgaagcacatggaacagggacggaattgggcgatccgattgaaataaatgggctgaaagccgcgtttaaggaactatccaatatgagaggcgagagccagccggatgttccggatcaccgttgcggcatcggctcagttaaaagcaatatcggtcatttagagctagcagccggtatttccggtttgatcaaggtgcttttgcaaatgaagcataaaacgttagtgaaaagcctgcattgcgagacgcttaatccttatcttcagctgactgacagtccgttttacatcgttcaggaaaaacaggaatggaagtctgtcacagatcgtgacggaaacgagcttccgcgccgtgccggaatcagttcgtttgggattggcggagtaaacgcgcatattgtgattgaagaatatatgccaaaagccaattcagaacacacggctacagaacagccaaacgtaattgtgctgtcggctaaaaataaaagcaggctgatagatcgtgcttcgcaattgcttgaggtgattcgcaataaaaaatatactgatcaggatttgcaccgcatcgcttacaccctgcaggtcgggcgcgaagaaatggatgagcgtctggcgtgtgttgcggggacaatgcaggagcttgaagagaaactgcaggcgtttgttgacggtaaggaagaaacagacgaatttttccggggacagtctcatcgaaataaagagacccagactatttttacagcagatgaagatatggcgttggcacttgatgcttggatcagaaaaagaaaatacgccaaacttgctgatttatgggtcaaaggggtctcaatccagtggaacacattatacggagagaccaaaccgcgcctgatcagcctcccttcatatccgtttgcgaaggatcactattgggtgccggcaaaggaacattcagaaagagacaaaaaagaactggttaatgcgattgaagatcgcgccgcatgctttttgacgaaacaatggagtttgagtccaattggatcagcagtgccggggacaagaactgttgccatcctgtgctgtcaagagacagcagatttagcagcagaagtgtcttcgtattttccgaatcatctcttaatagatgtgagccggatagaaaatgatcagtcagacattgattggaaagagtttgacggcctagtggatgtcatcggatgcggttgggatgatgagggccggctggattggattgaatgggtgcaaagactggttgaattcgggcataaagaggggctcaggctgctttgtgtgacgaaggggctcgaatcgtttcaaaacacatctgtccggatggctggcgcctcacgggctgggttgtatcgaatgctccaatgcgagtacagccatcttatatcaaggcatatggatgctgaggaggttactgatcatcgccgtctcgcgaagttgatcgctgatgagttttattccgattcttatgatgcggaggtttgctacagggatggtttacggtatcaagcttttctaaaagctcatccggaaacaggtaaggccacggaacagagcgcggtcttcccgaaagatcatgtacttctcattacaggcggcacacgaggcatcggactattatgcgcccgtcattttgcagagtgctatggagtgaaaaaactggtgctgaccggacgagaacagcttcctccgcgagaggagtgggctcgttttaagacatcaaacacatcattggcagagaaaatccaggcagtgcgggagctggaagcgaagggtgtacaggtggagatgctgtcgctgacgttatctgatgatgctcaggttgagcaaacgctgcaacatatcaagcgaacattaggaccgattggcggtgtcattcattgtgcaggtctgacggatatggatacgctggcatttatccgaaaaacttcggatgatatccagcgggtgctggaacctaaggtgtcaggtcttacaacgttatatcgccatgtgtgtaacgagcctttacagttttttgtcttattttcttctgtttcagccattattccggagctttcggcgggacaagctgactatgcgatggccaatagctatatggattattttgcagaagcacatcagaaacatgcgccgatcatcagtgttcagtggccgaactggaaagaaaccggtatgggtgaagtgacaaatcaagcgtatcgggacagcggcttgttgagcattacgaattcagaaggcttacgttttctagatcaaattgtatcgaaaaagttcggaccggttgttctccctgcaatggcgaatcaaacaaactgggagccggaactgctgatgaagaggaggaaaccgcatgagggcggtttgcaggaagctgctttacagagcccgccagccagagacattgaagaggccgatgaagtttccaaatgtgatggattattatctgaaacacagtcctggcttattgatctgtttaccgaagagctgagaatagatcgtgaagacttcgagattgacgggttgtttcaggattatggcgtggattcgatcattttggcacaggtgctccagcgtataaaccgcaaattagaggcagcgctcgatccatcgattctatatgaatacccgacaattcaaaggttcgcagattggctgatcggttcttattccgaaaggctgtccgctttattcggaggcaggatatcggatgcatcagcacctttggagaacaaaatagaggcggaggcatctgttcctgggaaggatcgagctcttacacctcagattcaggcgccagcgattttgtcaccggactctcatgcagaaggtattgccgttgtcggactctcttgccgattccctggggcagagacattggagtcatattggtcgttactatccgaggggcgttcgtcaatcggcccgattccggcagagcgttggggctgtaagacgccatattatgccggcgtgattgatggcgtcagctattttgatcctgatttctttttgcttcacgaagaagacgtaagggcgatggatccgcaagcactgctcgtgttggaagagtgtctgaagctcttgtatcacgccggttatacacctgaggaaataaagggcaagcccgtcggtgtttatatcggaggcagaagccagcacaaacctgatgaagacagccttgatcatgccaagaatccgatcgtgacagtcggccaaaattatttagccgctaatctttcacaattttttgatgtccgcggtccaagtgttgtagttgacactgcatgctcgtcagctttggtcggcatgaatatggccattcaggcgctgcgtggcggagatattcaatccgccatagtcggcggtgtcagcttgctgagctcagatgcgtctcacaggctgtttgaccggcgcggcattttaagcaagcattcatccttccatgtgtttgatgagcgtgctgacggagttgtgttaggtgaaggcgtcggaatggtcatgctaaaaaccgtaaaacaggcactggaagacggagatatcatatatgctgtcgtcaaagcggcctcggtcaataacgacggaagaacggcgggacctgcaacacctaatcttgaggcacaaaaggaagtcatgaaagatgcgcttttcaaaagcggaaaaaaaccagaggacatcagctaccttgaggcaaacgggtcaggttcaatcgtaaccgatctccttgagctaaaagcgatccaatcagtgtaccgttctgggcactcatcgcctctttctcttggctcaatcaagccgaacatcgggcatccgctatgtgctgaagggatcgccagcttcattaaggttgtgctgatgctgaaagagcgccgctttgtcccatttttatcaggtgaaaaagagatggcgcatttcgatcaacagaaagcgaacatcacgttcagccgagccctggaaaaatggacagattcgcagcctactgcggctattaactgctttgccgatggggggacgaatgcccatgtcatcgtagaggcgtgggaaaaagatgaaaaacacgccatcaagcgcagtccaatatcgcctcctcaattaaagaaacgaatgctttcgccaggcgagccaaagctggaagcggagacttcaaaaatgactgcggcaaacatatgggatacttatgaggtggaggtctaacgtgaaaaagataacgaaacaactcacattatcgttaaaaaatccgtttatttatcaccatgtggtttacggacaaaatgtcctgccgggattggcttatatcgatataatctaccagatattcagagaacacggtttctcctgctcagagcttcagctgcggaatttatccatctatcagccattgacggcggaacaggatgcagtaattgttttgaatatccaatgcgcggagaaaaaagaaggacagtggcaaatcacagccaagggaattgaaaaacgtgatgggaaagaagcttcagaagaaaagctctatatgaaggctgacatgcacgcagactccccagccatatttgaagaaacactggatctcagtcaaatcaaagcatctgcacagaacgttgttcagcttgatgatgtatatgaacaatgcagacgtcaggaattggtgcacagcgaatatatgaaagcaaaaggctgcatctatgaagaggaagacggcgtccttcttgagctttctctcggttcggaggccatgcttcacgcagaaggctttatgtttcacccgactctcatagacgggagcggggtgggtgccaatcatttgctcacatctttgcttaaaggagaacagaggctgtatttgcctctgttctatgaatccttttccgcttctgcacttttgcaaacggattgcatgacaagaattaagcgctcctccgtccggcgggaaaaagagctgatttatgtaacacttgaattttttaatgcgtcgggagaaaaagtggctgagttgaaaaactttacaagcaaattggtgcgagaagcggagctgattagcggaaaacatcaagatgcacaggagacacagatgacaagagcggacactgctgagcgtgataaacctgctgacatggtatcttctcccgttaattcctatagtgaggctgaacagttcgtaagccaattaatcgcagagaaaatcaataagccggtagaacaagttgaaaaacaggtcggttattaccaaatgggactgaattcatcgggcttgcttgaggtggtagaaacgatcagtgataagatcggtgagagcctttcgccgactcttctgtttgagcataccaccatagcggaactgtcagcgtttcttgccgaggaatatgctgagcattttagtgccgctggttctcttggccagaatgaaagagcacgcgtttccgacagcataaacgaccataagactgttgaaggctctcgtcctgcacctattgaggcagcaggcgatattgcgattatcggcttggcgggcaggtatccgaaggcagccaatattcatgaattttggaacaatctgaaagagggtaaggactgcgttagtgagattcctgagtcgcgctgggattggcagcgacttgaaggaatcacatctccttcgggtaaggacatttccaaatggggaggatttattgatgatcccgactgcttcgatccccaatttttcagaatcacgccaagagaagcggagacaatggaccctcaagagcggctgtttttagaaacatgctgggaaacgattgaagatgcgggctatacgccaaagacgttggccaagcctaaaggacgaaataaaaggcagcatgtaggagtttttgcaggcgtcatgcacaaggattatacattagtcggagctgaagaagcatcagcagaaaatgtgtttcctctttcgctcaactatgcgcaaatcgccaaccgtgtttcttacttttgtaatttccacggtccgagtatggctgtcgatacggtatgttcatcctctttgaccgcagtgcacttggcgttggaaagcatacgtcacggtgagtgcgatgttgcgttagcaggcggagtgaacctgtctttgcacccgaataaatatatgacatacggggtctgggatatgttttccactgacggacactgccgtacgtttggaaaggatggagacggttatgtgcctgcagagggtataggcgcggttttattaaagcctttgcgccaggcagaggaagacggagatcgcatttatgcagttattaaaggaagtgctgtgaatcatgtgggcactgtaagcggcatttcagtgccgagccctgtttcccaagctgatctgattgagacatgcttggagaaaacgggaatcgatccgcggacgatcagttatgtggaagcccatggaaccggcacgtccttaggagatccgatcgaaatacagggattagtgaaagcgttccgccaatatacgcaggatcggcagttctgttcaatcggttctgtaaagtcaaacattgggcacgccgaatccgccgcggggatcagcggtttaagcaaggttgctcttcagcttcaccatcaaaaacttgtgccttctttgcattcggaagaactgaatccgtacgttgattttgaaaagtctccattttatgtacagcatgaaacagaaacgtggaagcagcctgttatcaaggagaatggggaagacgtcccttatccgcgacgggcggggatcagttcttttggcgcaacaggttcaaacgcacatattatccttgaggaacatattcctcaagcagcggagcaggacgtttctttgtcctcagattctgacatatccgcagttattccgctttctgcccgtaatcaagaacgtctccgtgtatatgcaaaacgtctcttggattttcttcatgatgggattcagattagagatttggcgtatacattgcaggtaggccgtgaaccgatggaagaacgggtttctttcttagcatccggaattcaagaattgagcgaccaattgaaggcttttatagaaggacgaaaagccattcagcattgctggaagggccgcgtgtcaagaggaagcgaaccatcgcgtcccgccgaatcggtacataaattgctggagcaaagaaaactcgatcagattgcggagcagtgggcgaacggatctggtgttgactggaagctgctttacgagggaagcaaaccaaagcggatcagcctgccgacttacccatttgagagggtgcgttattgggtgccgaaagcggagaaaaagactgatcgttcaaaacaggagcggcacatcctgcatcctcttctgcatcaaaatgtgtccgacatatcgggtgtccgcttccgttcagcgtttacaggacgtgaatttttcttgaaggatcatgtcataaagggcgaacacgttttacctggcgcagctttattggagatggttcgggcagctgtggaaagggcagctgcggatcagttcccgacaggattccggctccggaatatcgtctgggtccggccgttcgccgtcacggaacagcagaaagatatagatgtacgtctatatcctgaggaaaatggtgagattacatttgaaatctgccgggaccctgaaagcgcagaggagtcgccgattgtatatgggcaagggagtgcagtgctttgtgaggctggtgaaaatccggttatcaacattgaagaattgaaggcaagctataatggccggacgctgtcaccttttgattgctacgaggcttatacagaaatgggtattcattatggtgacagccacagagcgatcgacagcctatatgccggcgaaaacggagttctagtgaaattgacgatgcctcctgtaatctctgatacagaagaccattatattctgcatccgagcatgatagattcggcatttcaagcatctatcggtttgaggctgggaggagctacgagtttagaagacagaaaggcaatgctgccttttgccatacaggatgtccgaatcttcaaaggctgcgaggcatctatgtgggcgcggatcacatatagcgagggcagtacagctggggatcgtatgcagaagcttgatatcgatttatgcaatgaagagggccaggtttgcgtgcgattgacgagctattctgcaagagtgttagaaacagatcaagaaggtccttctgaagcgaatgacacgctattgttcgaacatatttgggaagaacgtgctgcagagaggcaagagctcatagagtacgacacgtataaagtcgttgtctgtgatgttggagaacaaatggaaagcctccaaaatcatcttgactgtacagttctgcagcatgatacagagacaattgatgaacggtttgaaggttatgccatacagttatttgaagaaatcaaacagctaatgcactcaaaaacaggaggacatacattcattcaagtggcggtgcctgcgttggacgagcctcagctattaagcggcttaactggattgctcaaaacggctgaactggaaaatccaaaactgacaggacagttgatcgaaatagaaaccgggatgtcagctggtgagctattcgaaatattggaggaaaacagacgctatccgcgtgacacgcatatccgccactggcaagggaagcgatttgtaagcaagtggaaagaagtgtctggtgagcacctaagtgctgacatgccatggaaggataaaggcgtgtatctgatcacaggcggtgcgggcggtctgggattcatctttgcaactgaaatcgcaaaccaaacgaatgatgcggttgtgatcctgacaggacgctctccgcttgatgaaaggaagaagaagaagcttaaagccttacagaaacttggcatccaagcgatttacagacaagctgatctggctgacaaacaaacggttgatgccttattaaaagaaacccaaaacgtttacggagacttagatggcatcattcatagcgccggtttaataaaagataatttcattatgaagaaaaagaaagaagaggttcaaaccgttcttgctccaaaggtagcaggactgattcaccttgacgaagcaacgaaagatattccgctcgatttctttatccttttttcctcaggtgccggagcagtaggaagcgcgggacaggctgattacgcaatggccaatgcatttatgaatgcattcagcgaatatcgaaatggccaagcagagctgcataagcgttacggaaaaactctttcagtgtgctggccgctgtggaaagacgggggcatgcaaattgatgcggaaactgcaaggatgctgaaaagagaaacaggcatggtggccatggaaacagatcgtgggattcaggcgctatatcatggctggacgtcaggaaagccgcaagtgttagttgcttccggtgttactgatcggattcgtgcatttttacatgaaacgggacatggcaaaggccaatctcacaatatcaaaaaaagcagtctcaatcaggaggcagaaaaagcagacatgatcggggaaattgatgaagagatactaagagaaaaagcggagaactattttaaacaggtgctttcttcggtgattaagctgccagctggccagattgatgctgaagctcctctcgaggattacgggatcgattctatcatgatcatgcatgtaacgggtcaattagaaaaagtattcggatctttgtccaagacgctgttctttgaataccaggatattcggtcattaacccggtattttattgattcccgcagagaaaaactgctggacatcttgggatttgaaacgggaaaaccttctgttgaaagaaaatcagaacctgaaaaacaagaaatcccagttatcccaagaaagtctggatttcttcctttgcaagataaagagcagaagcaggtaagagagaaggaaacggaagaaattgcgatcatcggtatctcaggtcgctatccgcaggcagacaacattgatgaattatgggaaaaactgagggacgggcgagactgtattacggaaattcctgcagaccgctgggatcacagtctttattatgacgaagataaagacaagcctggaaaaacctacagcaagtggggcggcttcatgaaggatgtagacaagtttgacccgcagtttttccatatttcgccgcgtgaggcaaaattaatggacccgcaagagcgtttatttttgcagtgcgtgtatgaaacgatggaagacgcaggctatacaagagagcacctcggccgtaagcgtgatgctgagcttggcggaagcgtcggtgtttacgtcggtgtcatgtacgaagaatatcagctgtacggggcacaagagcaggtgcggggaaggtctctggctttaacgggaaatccatcatccatcgcgaaccgggtatcttattattttgattttcacggaccgagtattgctttagacaccatgtgttcttcttctttaacggctatccacttggcctgccaaagcctgcagcgcggagaatgtgaggcggcattcgcgggcggcgtgaatgtgtcaatccatccaaataaatatttgatgctcgggcagaacaaatttatgtccagcaaaggccgatgtgaaagcttcggacagggcggagacggctatgtgccgggggaaggcgttggagcagtgcttttgaagccattgtctaaagcagttgaagatggtgatcacatttatggaatcattaaggggacagccatcaaccacgggggaaaaacaaacgggtactcagtgcccaatccgaatgcccaagcagatgtcatcaaaaaggcgtttgtggaagcgaaggttgatccgcggacagtcagttacatcgaagcccacggcacgggaacctctctcggtgatcctattgaaatcacagggctgtccaaagtgtttacgcaagaaaccgatgacaaacaattttgtgcaatagggtcagccaaatcaaatatcgggcactgtgagagtgcggcaggtattgcaggagtaacgaaggtattgctccaaatgaaatacaggcagcttgcgccttccctgcattcaaacgtgctgaacccgaatattgatttccttaactcgccgtttaaagtacagcaagagctagaagagtggaagaggccgatcatcagtgtcaatggcaaagacatcgaattaccgagaatcgcaggagtctcttcatttggtgccgggggtgtgaacgcccatattttaatagaagagtatgctccggaacctgtggaggaacgtttaccagcgaggaaacagccggctgtcattgtgctctcagcaaaaaatgaggaaagacttcagaaacgcgcggagcgattgctgcatgccattcgtgaacaaacatatgttgaagcagatttacaccgaattgcctatacgctgcaagtcggccgggaagcgatgaaagaacggctggcgttcgttgcggaaacgatgcaagagcttgaagaaaagctgtatgaatgtatctccggaacagaaaatcgtgaatatgtctatcgcggacaagtaaagagcaacaaagaagccattgctgcttttgctgctgatgaggatatgtcaaaaacaattgaggcatggctgcaaaaaggaaaatatgcgaaggttttagacctgtgggtaagaggtttgcgaatcgactggagcacgctatatcaggatcaaaaaccgcggcgcatcagtttacctgcctatcctttcgcaagagatcgctattggatagacgtaaatgcaaaggctgaggaaaaaagaacggaggagccattcgctccagtacagcccgttattccgaagccgtctgtagacagagaagccagtggcaagcctgccaatattacgttacagcctttaatgaccaatcaggatcgtttagagcgtgttccatcagatacagaaacagagacgatcacggcggaagccttgtgcgatgaactgacagcgggcttagcggaagtgctgtacatggaccaaaacgagattgatccagacgaagcattcatagatatcggtatggactcgattaccgggctcgaatggataaaagcaataaataaacagtatggcacatcactaaatgtcacaaaggtatatgattatccgacaacacgtgatttcgctgtttacttagcacacgagttaagcacacaagctggggagaaaaaacaaacggagacgtacacgccgatcagacaaaaaacagtggtacctgctgctaaaccggctaatatatctctgcagccgttagaacatcatcagccagtgcaagaggaagctgaagaaacgattcaatatgcagcggcagaaatatctgcatcaagacaatatactgtagcaattgaaacgctgcatgaaaacttgagggaaagcatagcagacgtgttatacatggagccatacgaggtggatattgacgaagcgttcatagatatcggaatggactcgattaccggactcgaatggataaaagcggtgaacaagcaatacggaacgtcttttacggtaaccagagtatatgattatccaacgatacgtgattttgccgaaatgctaaagtccgagcttggaactcatcttgatagaaagatagagcatactgactctttcgaagcagcccagcaaaagccagcagcatcatctcatccaaagccggcagaacggccactacagcctgttcaacatccaataaagaaagaacatgagaagaaaacggttcctgttcttcaagaccgcccggaggatgcgatagcgattgtcgggatgtcgggaagatacccgggcgctcgtaatgtaagagagtactgggataacctggttcatgcgagaaatgccattcgggacattccaacatcacggtgggatgttgacaaatactatgatcctgtcctcaacaaaaaagggaaagtctattgcaaatcaatggggatgcttgatgatattgaacattttgatccgttgttttttaatattccgccgtcagaagctgaactgatggacccgcagcatcgaatctttttgcaggaaggctataaagcctttgaggacgctgggtacaacgcccgaactttaaatgagaaaaaatgcggtgtatatctcggcattatgagcaatgaatacggggtcatgctgaatcggcagtcaagagcaaatgccaccggaaacagctttgcgatcgcagcggcgcgtattccgtattttctaaatttaaaagggccagcgattcctattgataccgcatgttcatcttcattggtcggcactcatttagcgcgccaggcacttataaacaaagaaattgatatggcgctggtcggcggggtcagcttatacctgacgccggaatcttacatgagtatgtgtgaggccggcatgctttcacctgatggacaatgtaaagcatttgacaatggcgcgaatggttttgtgcccggcgagggtgcgggtgcgctggtattgaaaaggctgaaagatgcggaagcggaccgtgaccatatttatggcatcatcattggctcgggtattaatcaggacgggaaaacaaacggaatcacggcaccgagtgcgaaaagccaaatggatctggaaagagacatatatgaaacatacggcatacatcctgagagtatcagttatgtcgagatgcacggcacaggaacaaaacaaggcgatccaattgaattagaagctctgtccaccgtatttcaagaaaaaacagacaaaaagcagttttgcgcaatcggttccgtcaaaagcaatattggccatacatccgcggcggcaggagtagccggggttcaaaaagtgttattgtgcatgaatcataaaacacttgtgccgacattgaacttcacgacaccgaatgagcattttgaatttgagcattctcctttatacgtaaatacggagcttaagccttgggaaacggctgatggaaaaccgcggagagcatgtgtgagctccttcggatatagcggaacgaatgcccatattgtgatagaggaatatcagcctgaaaagaggaacgatcgattaacaaagcagcaccgctcagcattatttgtactctcagcgaaaaaagagaagcaattgaaggcctatgcggaagcaatgaaagatttcgtaacttccaatgaagatatcgatctggaggatatggcatacacacttcagacgggccgggaagcaatggattatcgcatggcgtttttggcggattcgagagaaatgctgatcaaagctttagatgattatttggctgaaatgccgaacggcagcatatttgctgctcacgtgaaaacgaagaagagcgaaatcaagctgtttgaaacggatcatgatgccaaagcattgctgcaaacatggatagagaaaaaaaggctggagaaagtagcagagctatgggtgaaagggctgcagatagattggaacaagctttatggggaatacacgcctcgccgaatcagcctgcctgcttatccgttcgcggaagagtattactggctgccaactcaagaaggcgaacccgaaaccattgctacagcaatgcctcaattcgaactgatgccaaagcgctgctttctgcgtaaacagtggcagccttgtccgattgaaccggcagaaatgacgaatcaaaccgtcgccattttggcaaatgaggagacaatggcattagcggaagagctttcggcgtatttctcgacataccgtatatttgacagccaagagctggatcgggtatctgctgctgactatgaacacgttgctggagcaatcgatctgatcgggtgcggaacgagccatgagcattctatgggctggataaactggctccaaaagctgatcgagcaaggacgtgcaagcaagcatcatttgacggtcttgggtgtaacaaaggggctggaggcctacgcaaatgagggtgttcttttgtctggtgcttcacgggccggtttataccgcatgcttcaaagtgagtacagccatcttacttcaagacatgcagatatggaatgcgaagcctctcatgaggagctggccagactgattgcagttgaatattatgccaagagcacagaatcagaagtctgttatcgaaacggacagcgatatcgcgcatatttgacagagcagccagcagaagccgctctaagtcataagcaagtatcgttttcaacagacaaagtcctgcttattacaggcgggacaagaggtctcggcttgctgtgtgcgcggcattttgtgaaaacatacggcgttaagcggctggtccttatcggccgtgaagagcttccgccgcgtgaccagtggaattcggtaaaaatttcctcgcttgccgagaaaataaaagccgttcaagagctagaagacatgggtgcgcaagttcaggtgctgtctctggatctcacagacagggttgctgtcgaacagagcctgaagacaatacacgaaacaatgggggcgattggcggagtcatccattgtgccgggatggtgaacaaacaaaacccggcttttatcagaaaatcactagaagagatcggacaggtgcttgaaccgaaagtcgaaggtctgcaaacgttgtttgacctgcttcaagatgaaccattggcgtttttcaccttgttttcatcagtatcagcggccatccctgcactagcagcaggacaagctgattacgcgatggcaaatgcttttatggattattttgcggaggctcatcaagataaatgtcccattgtaagcattcagtggcctaactggaaggagaccggtttaggcgaggttcgaagcaaagctttagaacaaactggattgatcagtttgacaaacgacgagggattacagctgcttgaccagattctatcagacagacagtatgctgtcgtgctgccggcagtaccagatacaaacgtttggaagccggataagctgatgcagccgtcattgcctgtcgaagctctctcgcatcctgagacgaaagagcaaaccagcactcgcaacctgttccctgaaacagtcgactggctcgtaactcttttttcagatgaactgaaaatagctgcagaagactttgaaacggatgaacctttccaagaatacggaatcgactcgattatattggcccagctggtacagcagatgaaccaacaattaaatggagatattgatccgtcaatcttgtttgaatacccgacaatagaatcctttgcacactggctcatttcgaaatatgacatatcagctgttttacagccatctgttcctgagaaacagacacctctcaagccgcaatcagcaatgaaacagaagctggtgccagaacagcggccgcaacagataagccatgaaaaaacggcacttcttgctgaggacatcgctatcatcggtcttagttgcaggttcccgggagcagaaaccctagaggaatactgggatttaatacgtgatggacggtctgcgattgcgcctgttccgcctgaacgattcgggaactccagctcgaattacgcgggcctcattgatgaaatgaaccgatttgatcatgatttcttcatgatgtccgaaagcgatgtcagagcgatggaccctcaagctttggctgtattggaggaaagcttgaagctatggtatcacgcgggttatacagagaaagaagtgaaaggcatgagggctggtgtttatataggaggccgcagccagcacaagcctgatccggccagtctttcaaaagcaaaaaatccgatagtcgctggtggacaaaactatttagcggctaacatctcacaattttttgacttgaagggaccgagtattgtcctggataccgcttgttcctctgcactggtggggctgaatatggccattcaggctctgcgaagcggagatattgaggcagcggttgtaggcggcgtcagtttgcttgatgctgatgcgcatcgaatgtttcatgagcgcggacttttatgtgacaaaccgtcattccatatttttgataagcgggcagacggtgtcattttaggagaaggcgtgggcatggttctcgtcaaaaccgtcaaccaagcggttgaagacggagattccatatatgcagtcattaaagccgctgcgattaataatgacggaagaacggcaggcccatcatctccgaatctcgaggcacaaaaggacgtcatgctgtcagcgcttgaaaaaagcggcaaaaagactgaagagatcagctatctcgaagcgaacggatcggggtcggcagtaacagatttacttgaattaaaggcaatccagtccatttaccgttctgaatcaaaggctccgttagggctgggatcggtgaaacctaacatcggccatccattatgtgcagagggaattgcgagcctgattaaagtagctttaatgctgaagcatagacaattggttccgttcctgtcaggtaatgaaaatatgccgtattttgatatagaaaaaacagatttgtatttcagcagatcgcaagccgagtggaaggagacaacgccggctgcggcaattaattgttttgcagatggcggaacgaacgcccatctcattatagaaggttggagagactcggctgagcgtccaattagaagaaaacctctgcctttgccggaattaaataggcagcccgttttaatcaaaccatcagctcaaaacgtgcagaaaaaagtgcattcagacacaggggcttctaaagatatgttttggaaaactttcaaataagagaggagtgggaaaatgataactgaacaactgcacatttcattaaataatccaatcatgtccaaccacaaggtatatggacaagcgttattacccggccttgcttatatagatttaatctaccaagtattccaggaacatggttatgcataccaagagcttgaattaaaaaacctaaccattttttaccctttgatcgcagatgagtcatatgacattgccctgaccattcacgtgtctgaaagaaaggaagggacatggtccatcatcatcgacggacaaaaacagcatggagaatcactatctgacaagagacaatatgtgactgctgacatgcatcgtaaagagcaaaccgcttttgccgaatcaatagaccttaatcagtggaaaagtacagctgacaggattctgaatttagatgaaatctatgaacaatgccgatctcaagagttagtgcataccggcatgatgaaggcggaaggacagatttatgaagccaaagagggggctgtaattgatttagcagtcggacaggaagcattgcgtcattctgatgcttttctgtttcatccgacgcttattgacggcagcggcataggttcaagctgcctgatctcagatcaaacgatgtacctgccattgtattatgaatcgttttctgcttcagaacgattgcaaaaaggatgtacagcacggatcctctcctcatctgtgcgccaaaagaaagaactcacttatatgacgattgaatattttaattcagcaggacaaaaagtggccgagctgaaacaatttgcaggcaagtctgtacggaatatgtcagcctttcattctgcaaaagaaattcaagaagaaagagctgctgtctctcagaacatcagtcgggactatcccgcatttgaaatgtatttgcgtcagctgcttgctaagcagcttgaaaggccggcagaacaaatggatatccacgctgggtactatgagcttggtctggattcttcgtcattgcttaccgtggttcaggaaattggagataaggttggggcggatcttgctccgacactgctgtttgaatttacaacaattgcagaactagctgctcatcttgctgatcactattcaattggagaggcggacgatgctgtccgccaatctccttcaccaattgatggtgttacctcttcaccagagatcggggaggacatagccattatcggaatggcgggacgctatcctaaggcgaaaaatatacaggaattttgggaacagcttaaagcgggtaccgactgcatcacagagattccaaactcacgctgggaatggaaagaaagcgatggactggattcacctgcaggcaagccgctctcgaaatggggcggctttatcgaggaggctgattgctttgatcctcaatttttcagaatctctccgcgtgaagcggaaatgatggaccctcaggaacgcttatttttagagacgtgctgggaagctattgaagatgcgggttatacaccagagacaattgcttcaccgcagggagaaaataaaagacagcatgtcggtgtgtttgccggcgttatgcataaggactattctcttataggagctgaagctctatcagaacacaatccatttcctttatcgctgaattatgcgcaaatcgccaacagggtctcttactattgtaatttccacggcccaagcatggcggtggacacggtctgctcttcctcattaactgcggttcatctggcaatagagagcatccggaatggagaatgcgaggccgcgcttgccggaggcgtcaatttgtcactgcatccggctaaatatatcagctatggcagtgtagggatgcactcaagtgacggctattgccatactttcggcaaaggcggggatggctacgtatctggagaaggtgtcggcacagtattgctaaaaccgctgcgaaaagctgaacaggacggtgaccgaatctatgctgtcatcaaaggcagtgcgataaatcatgtaggaaaagtaagcggaattacagtaccgagcccggtagctcaagctgatgtaatcgaagcatgtctagaaaaaacaggaattgatccgcgcaccatcagctatgttgaagcccatggcactggcacctcattgggagatccgattgaagtacaggggttagtaaaagctttcagccgcaatacgcaggacaagcaattctgttcaatcggttctgtgaaatcaaatattggccatgctgaagctgcagccggcattagcggcttaacgaagactgtcctgcagctgcatcataaaaccttggtgccgtcattacattcagaagagctgaatccttatttgaagcttgatcaaaccccattttttgtccagcatgaaacaaaggaatgggagcagccatcttttacagaaaacggggtggacgtcacatatccccgccgtgccggtttaagttcgtttggcgcttcaggatcaaatgcgcatcttattttggaagaatatattccggcagagagccattcagagacgattttaacgaaaaatgaagaaatagtgatacctttgtctgcgagaaacaaagatcgtctgcaggcttacgctcttaaacttcttgattttcttagcgaggacgtcaatcttttagcgttagcttataccatgcaggcaggacgggttgaaatggaggagcgtgcggccttcattgtaaaagacataaaagatttaacggctaaacttcgggcgtttgccaatggcgaagaagagatcgagggctgctggaccggacgagccaaggagaatcaggaggcggctgggctagcatcggtaaatgcgctgaataacaatttgataagagacagtgaaatgatggaaatggcgaaagcatgggttcaaggaaagcgggtcacctgggacgacctatacggcgatcgcaagccgcttaagatcagtgttccgacctatccgtttgcaagggagcgctactggatctcggttcctgaaatgaaaaccagcactgtgaatcatatcttacatccgctggtgcaccgcaatacatcagactttactgagcagcgctttagctctgtatttacaggcacggaatttttcctgtcagatcatgttgtacagggacagaaaattttgccgggcgttgcctatttagaaatggcaagggaagcagcggaaaaagctgcaggcgatctggacggcgaacaaagagtggtgtcgcttaaagacattgtgtgggtgcgtcctatcacgatagaaagtgaaccaaaagaaatacatattggcctttttcctgaggataacggggacatttcctttgatatttatagcagctctgaacataaagaagaagccctgacgatacactgccaaggtcgcgctgtcatttcagatgaagcggagacttccattttaaacctttcatcaatacagacagaatgcagcctggacacagtgacgtcagaacaatgctatgcagcgtttcgaaagattgggcttgactatggcgagggctatcaagggattgaaaaagtctatgtcggcaaagatcaattgcttgcaaaaatctcgttacccgcttttctaaaaaacgacaagcagcattttgcgctccacccgagtttgatggattccgcgttccatgccacagtcggttttatcgttagctcagtcaatgccgctggacaagctcagacgctgtctcttccatttgcgttacaggaggttgatattttcagcccatgtccagagaagatatggtcttatattcgatacagttcagacagtaaagcggagaacaaagtcagaaagtatgacattgatttatgtgatgagaacggacgtgtttgtgtgcgaatgaagggtgcctcgatgcgggcacttgatggagagcagcattcaaagccgcaactattaactgattctcagctgaccgggcatacggtgatgatccccgtctgggaaccagtctctctagaagcggaggataatgcttcgtttgctggtaaaagagctgttttatgcggagctgctgaagctgatcggactttcataaagcatcattatccgcaaatttcctttgtcgatatccgccctgcagatgacattgaggcaatagcggacaaactgcaagcgtacggaagcattgaccatgtattgtggattgccccgtcacaccggggaagtataggtagtgatggacaagaagaagctgttcttcacttatttaagcttgtgaaagcatgcctgcaattaggctatggcgagaaacaacttgaatggtctcttgtgaccgtccaagcgcagccggttacgcaacatgaggcagtacaacccgctcatgcaagcattcatgggcttgccggcacaatggcaaaggaatatccacactggaaaatccgtcttctcgatcttgaaaaaggctgcacatggccggtaaatcacatgtttgcgctcccagctgaccgccttggccatgcttgggcctatcgtaatcagcaatggcatcagcagcaattgatcccatatcggtcctcactgtcaggcgacacgctatatcggaaaggcggagtctatgtggtcatcggaggagccgggtatatcggagaggcgtggagtgagtacatgatccgccgctaccaggcgcaaatcgtttggattgggcgaagtcaacttaatgctgccatccagtcaaaaatagaccgactttcggcgcttggccctgagcctttctacattgcagccgatgcagccgataagcattcactgcagcaggcttatgaacaagtgaaaaaacgtcatcctcatattcacgggattgttcactctgcgatggttttatttgagcaaagcctggaaaaaatgaagccggaagaattcaccgctggactggcggcgaagatcgatgtcagtattcggatggcccaagtgttccgccaggagaatgtagattttgttttattcttctcttcgcttgtagcccatatcaaaaatgtgaagcaaagccattatgcctctggctgtacatttgcagatgcttttgctcaccagctttctcagagctgggcatgccctgtaaaagtcatgaactggggatattgggggaatagtgaagcggctgaggatgaacattatgtacagctcatgaatcaaatcggcttaggtttaattgagcccgcggaggctatgaaggcgctggaagcactgctttctgggccagtcagccaaacagctttcattcatacgacaaagcctgtagcagtcgaaggcgtgaatcagaatgaattcatcactctttatccagagcaaccttcagcagatgcagagagcctgatggagcgtctgccgactacgggacgatttcaaagagtgacacatgaagagcttgatgatcttctttacaggctgttgttaggacagctgcaaacagccgagctgtttgatggttatacattatcggttgaacgtcttcaacaatataagactcgtgaattttatggaaaatggattcggcaaagcagcgaatttctcttgcagcatggctatcttaagaaagttggagattcattggtgaggaaggaccaagcagaggatatcgagctgctttggctagaatggaacgcgaaaaaagaaaagtggcttaaagacagcgagacaaaggcgatggttgtattagcagaggccatgctgcaagcattaccggatattttgacagggaaagtccctgcaacagatatcatgttcccgcattcctcgatggaactggtggaaggcatttataagcataaccaagtggcagactattttaataaagtgcttgccgatacattattagcttatctggatgaacgtctgaagcacgaccctgaggcatcgattcgcattatggaaataggcgcaggcacaggcggcacgagtgccggaatctttgaaaaactgaaaccatatcaaaagcacatcaatgaatattgctatacagatctgtctaaagcatttttgctgcatgcagaaaaggaatatggggcggaaaatccgtacctgacatatcagctttttgatgtggaaaaaccgattgatcagcaggaatttgaagcgggaggctatgatgtcgtcattgccgctaatgtccttcacgcaacaaaaaatatccgtcaaacactgcggcatacaaaagcggtaatgaaaaacaacggaatgctgctgctgaatgaaatggcgggaaacagcctgttccctcacatcacctttggtcttttggaaggctggtggctgtatgaagatcctgcagtgcggattcccggctgtccaggcttacatcctgacagctggaaagcggcacttgaaagcgaaggctttgaatctgtctttttcccggccgaggcggcacatgatctgagtcaccaaatcgtcgcagcctcaagcaacgggctggttcgacgtatgatgaaaaatgtgatcttgccggagaaggttgtttcacaagcgtctaatcaggagccagcctacattcataccatagattcagaggaagctggacaatcgaaacatgctctcctaagagaaaaaagcacagaatatatgaaaaaactaatcggggaaacgttgaaaattcctgcaggaaagattgagtcatctgaacctcttgaaaagtacggtattgattctatcgttgttgtccagctgacgaatacattgcgtaaagaatttgaccatgtaagcagcactttatttttcgagtaccagaccattgacgcattagtggagcatttcatcaaaacaaaaacagaagctctgatgaaattaacaggtcttgaccgtcaagttcaacaacatacaccggccgaaagcagaacccaatcttcacagaaacctgatcaggccgctaaaagaacacggcgctttcgcaagcttggcttcagcggggagaaagaaacaccgacaaacactcttgcaagccgtgacgttgccgttatcggcatttctggacgctatcctcaggcggaaacagcagaagacttttggaacaacctaaaagaaggaagaaattgtattgaggaaattccgaaagatcgctgggattggaaagcttattacgataaagaaaaaggaaaagaaggatcaatttatacgaaatggggcggatttatcaaggatatggacaagtttgacccattattctttcagatttctccgcttgaggcagaaagaatggaccctcaggagcgattatttctgcaaaccgcttatgcaagtattgaagacgcgggatacacgcctgactcgctctgttcaagcagaaaaatcggcgtctttgccggagtcatgaacaaaaattatccgactggctacggctattggtctatcgccaacagaatatcctatttactgaatttccaaggcccgagtcttgcagtcgatacagcctgctcatcctccctgacagcgattcatttagcgctggaaagcatctatagcggatcgagtgattgtgccattgccggcggtgtcaatttagttgtcgacccggttcactatcagaatttatctgtcatgaatatgctctctgctagtgatacatgtaaatcattcggcgatgatgcagatggatttgtcgacggtgaaggcgtaggcgccattgtgttaaagccgctgcagcaagcaatagcggacggtgaccatatttacggtgtgataaaggcaagtgccattaatagcggaggaaaaacaaatggatacacggttccaaatcctcatgcacaggcacaggtgattaaagaagcaattgagcgcgccgacattcctgcccgaaccatcagttatttagaggcgcatggaacaggcactgcattaggagatccgattgagatagcggggttaacaaaagcattcgagaaagatacgcaggagaaacagttttgtgcgatcggctccagcaaatcaaatatcggccattgtgaaagtgcagccggaattgcagggctgacaaaaatactttttcagtttaaatatggccaaattgcgccatcattgcatgctcagcggttgaatccgaacatcgagttcagccatacgccatttgtcgttcagcagcaacttggtgaatggaaacgcccggtgattggcgggcaagaggtgcctaggcgcgctggcttgagcagttttggcgccggagggtccaatgcccatatcatcctggaagaatatattccaagaacgggggcgcaaacgccgaaagaccatcctccagcgctgattgtgctgtcggccaaaaacatggaacgtttgcaagaaaaagcggaacagctgcttacagccatcaaacaaaaaaggtactgcgaaacagacctgatcaggatcgcctataccttgcaaacaggccgtgaagcaatggaggaacggctggcctttatagcggaatcactagaggatcttgagagaaagctgaacgattttatcgaaaacaaagcagacagcctgtatctggatcgcatcgatgataacaaaaaagcgttagcagtcttatcagcggatgaggatacggaaaaaatcatagaagcatggatgagcaaagggaaatacacgaaactgctggatctttgggtgaaaggcttgtctttcgactggggcatgctgtacggcacccaaacgcctgtccggatcagtcttccggcatatccatttgcaaaagaacgttactgggcaccaggcgcggcaaaggccccggtgtctatagaacaggatcatgatcagcaaacagaagaacctttcaaggttatgacgtttcaagaagtgtggaaagaagagccggcgactctcacatcgaaacgtatcaaaacgctcatctgttttctgactgaaagagaaaagcaaaacgcatttgcttcagccctgaaaaacgttgatcaagacaccaaggtcatttttatatcacagggcgaagtgtacagcaaacagtctgaatatagctaccagattgtgcggcaagaacccgttacttttgaaaaggccttccagagcattaaagaagaacttggagagccagatgcaatcctctatatgtggcctatggaagacaagcgctgtataaaggaccattcctgtattgtttacctattacaaggtatgtccgcagcaaagcttcatccttcacggctgctgctggcaggatgttttgaagatagtcttgaccgaagttatctggaatcatggattggcttcgaacgttcactcgggcttgtccttccgcacacaaaagtgactggaatctttcagcccgcggaacaaggatcgatggatgattggacacgtaaagtctgggcagaattacaggcttcaactgaacaaacggttttgtatcagaatctgaaacgatatgtaaatcacattgaacagacaacgatacaaccggacaacagcaaattgaagtctggcggtacttacctgattacaggcggtgtaggagggcttggttatttatttgccaagcatttggccaaaaactatgccgcaaacctgattttgacagggaggtcgccttttaatgatgagaagcaaaagcaaataaaagaattaaaggatctaggcggcgaagcgatgtatgcagaagcagatgtgtctgatcctatcgcaatgggagactgcgtaaaaagagggaaagaccgattcggtgccatcaacggtgttattcatgcagccggaatcgagagcgactctgctatttttgacaaaaagatcgaaagcttccagcgcatcattgaaccgaaaatcaacggcacgatagcgcttgatgaatggcttaaaaatgaagaccttgattttatgtgttatttttcttcttcttctgcggttttaggggattttggatgttgtgattatgcgattggcaataggtttcagatggcttacgcacaatacagaaatgagctgcataacggtaaaacgtttgtcatcaactggcctgtgtggaaggatggcggaatgaagatcggtgatgaggaaacaacggatatgtacctgaaatcaagcggccaacgcttcctagaagccgaggaaggtatccgtatgtttgagcacatcctagctcagcaggatgctcagcatctcgtgatagccggtcagcccagccgtgtcagcagatttttaggaatgactgaaccagctattccagaaccggccactcaagcccctctagcacaagaaaacaaggatgaggtaaaaacactaagcattgaaaagcgtttagaacacgacttgaaagagcatattcacacattgcttaagatttcaaaggacaagctgaatttgaacaaaaattgggccgacttcggatttgattcgatctatttggctaaattctcgaacgtgttatcaaagcatttcaacatcgaagtgacaccggctttatttttcggctattcaactttacaagaattgatcagctttttcttaaccgatcataaagagctgattgaagcattttaccgggatgatgcatcagaggcgcaaaagccccctgaagcttatgcagtaattcctgtagctttagaaccagaagccagtaaaaaaagcattcggcaggttcacgatgagcctattgccattatcggcatgagcggcaggttccctcaagctgattcggtccatgagctgtgggataatctgaaaaacggtaaatcgtgtatctctgacattccgggcgaacgccgggactgggggagagctaacagagatccagaaaaagcagtgccaaggtggggtgcatttttgaaggacatagaccggtttgatccgctgttttttcaaatatcgcctaaagaagccgaaagcatggacccgcgtcagcgcatttttctagaggaagcatggcacacgtttgaagacgccggctatatgggagatcggataaaaggaaaatcctgcggtgtttatgtaggtgtggaagaaggggaatatgcgcatctaaccggagatacggattacattaacggaacacaaaacgccacattgtctgcgagaatcgcatacgcattggatttaaaagggcctaatatggctttgacagcagcatgttcatctggactggtggcgattcaccaggcatgttcagctctgcgtcagggggattgtgaaatggctttagcgggcggcgtcagcttgaatatttctcacatgtcttttgaggcgctgacaagggccgaaatgctgtctccgaacggacaatgcaaagtgtttgaccaggatgccaatggtcttgtgccaggtgaagcggtggctgctgttctcttgaaaccattatcaaaggcaattgaagataaagatcatatttatggctgcatcaaggccagcggcgtgaattacgatggcaaaaccaacggcattactgcgccaaatccttttagccaggcagaattgatcgaaaacatttatgaaaaaaatgaaatcaatccgctcgatattcaatatgtgatggcgcacagtaccggctcgaatcttggtgatccgcttgaggtccaagcgttaacgagcgtgttcagcaaatatacgaagcagaagcaattctgtatgatcagctcaattaaacctttaatcggacatacatttgcagcgtcaggaacggttgctttaatcagtatgctgatggctatgaaaaaccagatcattccggccactcatcactgtgaatcggaaaacccgtatattccgtttaaagaaagcccatttgtgctttgcaaagaaaaccgttcgtggatcaagaaaaatcagaagccgaggatgggaacgatcagcacgactggaatcagcggcaccaatgcacatgcagtcattgaagaatacattccggatgatcagccgtccacacagcggcatcaagggtcaccgcagatctttgtgatttcagcccaaaatgacgatcggcttcaggatgctgcctgccgcatgattgcgtatctggagcagaatcataacctttctttacctgatgtggcatatacgcttcaggttgggagaaaagccatggaagcaaggctcgcgatcgttgcaaacaatcaggagcaattggtgcgaaaattgaaggaatatgtggaagcaatgaagaatggtggggtatcaggccaacagagatccctttatacaggatatacagaagggattttagaagaacaagatgaagcagttctgcaagctctcgcaaaagaaagaaatttggaaaacatcgcggaatgctgggtgaaaggatatcagattccttgggaactccttcatgatggcgatgacgttcggatggtttctttacctggttatccatttgcaagggaacggtattggatttcgtcaggcactcagcaatcagaggccgttaaacagcattcacaagatatgaaaacagagattgacgagccgaatggcaaaacccatattcaaaagatcattgttcaatttttagcacgagaattgggcatatctgaggatcgaatcaatttcaaaagaaacttcctggattatgggatggattcaattcttggccgaaaattgatgcggcatatcgaaaaaaccacgcagctgaagatggccggccgggaaatccttgaatgtcagacagtccaagctctatctgaccatttggccttaaaagcggaaaaacaaaatcatagcgcagcagcacatcacataaagggcacgtatacagacgagcaaatcattggattgatgcaagaggtggcgctagggaaattggattttaagagtgtgcaaaacatcatagaagggagtaaatcgtatgaatcataaagaaattctcgatgccttcagatcaggagaattaaccatttctgaggtggaagaacatcttaaaggcatgaagcggcagttgaaaagcccgctttcagaagggcaaaaagggctgtggatgcttcaaaaaatgtctcctgggatgagtgcatataacattcctttatgctttcgcttcagcaaaccaatacatgcagagacgttcaagaaagcccttctgtttgtacagagacaatatccggtcttagccagtgtgattcaagaagaaaatggcattccatttcaatcggttcagttatcaaaggatctttattttgtggaagaggatatatcagcaatgaaatcagcagatattatgccttttctaaaagaaaaagcaaaagaacctttccagttggaagctggtccgttatggcgcacacacctttttcatcggttagaagaatgcattgttcttataacaattcaccatatcatatttgatggtgtgtcgatgctgacattgatatcggcgctattcgaagcgtatcaacaattgctgaatgggattgaacccttgcagcagccatcaacagctgattattacgattttgtcgattgggaaaatcgaatgctgactggcagagaaggggaagagcatctcgcttactggaaagaacagttgtctgggagtctgccagttcttgatttgcctgctgaccgtccgcggtcttcagcacgaaaatttaaggggcaagcttataaaagcttgctccctcatcacctgagaaatcaaattaaatcgtttgcccgcaccaatcatgtgaatgaatcggttgtgtttctctccatttacaaagtgctgctgcatcattatacaaaacaaaaggatatcattgttggcgttccgacaatgggtcggcaagaagacagatttgaaaccctaatcggttattttatcaatatgatggctgttcggagcaagaatatcggatctcagccattaacagcatttattcgggaactgcagctgacagtggctgtcggcctggatcatgcggcgtttccgttccctgcattggtaagagagctgaatgtagaccgctcggccgcggattctccggtttttcaaacagcttttctgtaccaaaacttttttcaggcaacaggcttgcaaaaagtgcttgaaccgtatcaaacgcttggcatcgaatatattgaagacattcggcaagagggtgaatttgagctggcgctcgaaatatatgagcaagaaaatgaaacagtgcttcatcttctgtacaaccctgatttgtacgaactgtcctccattgaaagcatgatggagaactatatgaagctcgcgcagcacatgatggaggacccgtctttgccgcttgaagcctactctttgcaattaaatcaagaacaaactagtttgctggaacaatggaatgcgacagggacaaacatcgcaaatgacaagtgtatacatgaggtgtttgaggaaaaagcgaaacaaacccccgatgcggttgctgtgatgtttgaagacagatcacttacatataaagaagtagatgaaaaaagcacatctgtggcagtctaccttcaacatcagggtgttagacctgaacagcccgttggcatttgtgcagagcgttcgtttgatatgatcatcggaattttaggaatactgaaagctggcggagcgtatgtgccgttagatccaagttttccgcaagaacgattaaagtacatgctcaaagacagtcaggcatccattgtcctcacccaacctaacgttcatgataggatcagcggattaactggcagccatgtaaaagcgatcaatatcgagttagcttgccgaaacggttatacagaccagcaaagcagcggtttaaagcgggaagtaaaaccggaacacctcgcttatattatttatacatcgggaagcaccggagagcctaaaggggttatggtagagcatcggagcattatgaataccctgaattttcttgaatctcactatcctgtaacggctgaggatgcatatttattgaagacgaactatgtgtttgatgtatcgatctcagaattattcggatggtttattggagatggccgtctagtgattcttccgcctaatggggagaaatcaccgcagctttgcatggattatattgaaacatataaagtgactcacattaattttgtgccggccatgctgcatgtttttttagaaatggcgaaagacaacaagcgattcacagaggacggtccgctgaagtatatgatggttgcaggtgaagccttccctaaagtattagtgaaaaaggcggtatcgctctttacaaactgccgtgttgaaaatatatacggaccgacggaagcctccatttacgctgcgtatttcggatgcggaaaaggagatatcgcaagtcaccatacaccgattggaaagcctgtttccaacacgaaaatttatattgtggaccagcatttgaagcctgtcccgatcggaaagccaggtgagctttgcatcgctggagccggcttagcaagaggctactttaaaaagccggggcttacggctgaaaaatttattgataatccctttgaatcagggacgaagctatataaatcgggtgattcagcaaggtggcttcctgacggcaacatagaatacttgggacggattgacagccaagtcaaaatacgcggttttcgcgtcgagctgggcgcaatagaaacaaagctgggtgaatttccgggcattttagatcaggcggtagtggtgaagcagcttgagggccatcaacagctcgctgcttattatacagaggaaagcggacatgcctctgccaatccaaaagatttgcgccttcatctaaaatcgagtctgcccgaatatatgataccttcacactttatccgcttagatgagcttccattatcgcccagcggaaaagtgaaccgtaaagaattagaaaaacgcgagatcgtgttcaacagaaggaaaccaaatcacttgcaattaacggaaatagaggatcaggtgctgcgcatttgggaggaaacgctcaaggtcagcggatttgggccggaagacggatttttcgatgcgggcggcgattcgcttctggctgtagctgtggctgaacgaatcaaaaaagaattcgattgtgagtttcatgttactgagctgtttgagtattccacgatccgtgcaatcagtgaatacattttggagatgaaaaactcagatctagccgggacacaaaatgaagatgatcatgatgacaaaaaagatggaaaatacccgaaacagaagattcccccttattttgacgacagtgttgcgattgtggggatatcttgccagttcccgggtgcgaaaaatcatcatgacttctggaaccacatcaaagaaggcaaagaaagcatacgattcttttctgaagaagagcttcgcgcaaatggagttcccgaagaattgatacagcatcctgactatgtgcctgtgcaatctgtgatcgaagggaaagacttattcgatcccggtttctttcaaatctcgccaaaagatgctgagtatatggaccctcagcttcgcctcttattgctgcactcctggaaagcgattgaagatgcaggatatgtggctaaggagattccggcaacaagtgtatatatgtctgcaagcagcaattcatatagaacgttattgccgaaggagacaacagaaggacatgaatcaccggatggctatgtctcttgggttttagcccaaagcggaaccattcccacaatgatctcacataagctcggattaaaagggccaagctattttgttcattctaactgttcttcatcactagtcggtttatatcaagcatacaaaagcctgacatcgggcgaatcacaatatgcgcttgtcggaggcgcaacattgcacgcacaatcagcgatcggctacgtgcaccaaaacgggttgaatttttcaagcgacgggcatgtgaaggcgttcgatgcttcggcggacggaatggccggaggtgaaggcgtagcagtcatcctgctgaaaaaagctgtggatgccgtaaaagacggagaccatatttatgccattatgcgcggaataggcatcaataatgatggggcagagaaggcaggcttctatgcgccaagtgtaaaaggccaaacagaagtgatacagcatgtattggatacaaccaagatccatcctgaaacggtcagttatattgaagcgcacgggacgggaacgaaattaggcgatcctattgaaatgtctgctctaaataaagtgtacaagcaatacaccgacaaaacacaattttgcggaattggttcagtgaaaacgaatatcggccatttggatacagctgcggggttagccggatgtattaaagttgcgatgagtttataccataatgaacttgcaccgaccatcaactgtacggagccgaatccggatataaagtttgaaagctctcctttttatgttgtccgtgaacgaaaatcgttagagaaacacgcaggtgtccatcgggcggctctgagctcattcggccttggcggaactaacgcccatgcaatatttgagcaatatgaaaacatttctgatgcaggtgccgaaaacgaaggcaatcagccttacatcattcctatatcagcaaaaaatagtgaacggctccaagtatacgcgaaggaaatgctgtcctatatcagtcaagacgagcaaaggcatttctctttaagagatattgcatataccttccaagtcggccgtgaagcaatggataacaggatcgtttttatagtgaacgatctggaagagtggaaacatcagctggaagcttttgtgactggaaagccgctcgcagaaggctgtattcaaggagaaaaaacgagaatgacatccgctgaacagctgcttggaaatgctgaagcagatgatatggcttcatcgcggatatcaaaagaagaattgagaaagcttgccgagatgtgggcaaatggctttcacgttgaatggcgcaggctctatccaaatataaagccacgccgcatcagcttgccgacatacccttttgccgaagaacgatactggcctgaaagcagcaccggcgctatcacaacaattgaaccatctcgtttgcatcctttggtgcaccataatacatcggttctgtcagagcagcgtttcagctccattttcacaggacaagagtattttattgccgagcatatcattaaaggcatggcgattttgccggcggcggtcacgcttgaaatggcaagagccgctatagaacaaggaattggcggattggaggatcatgaaactggaatcaggctgaaaaatgtcgtgtgggttcgcccggttgtagcaggaagtgagccggttcaggtaaatatcggactttacgatgaagatggcggacatattgcttatcggatgtatggtgatccggaatccgctgatgcagaaccagttgtatataaccaaggtaaagcggaattgattcagttaaagcgagaaaaagcactggatctttctaagatcaagaaacaatgtgatcaaagcaaaatggatgctgcctcgttttatgaagggatgatcggcgccgattacggtccaggttacaagagtgtagaggccgtatataaaggcgacggccagctgcttgccaaattatcactgccagaatctgttgcacatacgttgggcgattatgttcttcatccaagtgtaatggacggggcgttacaggcggctgaatatttgcaaaatgtcgtcagagcggaactttcagacactgaagactttaaggcagcactgccatttgcactggaggaacttgaggtttttcgtcagtgcgtttctgacatgtgggtttatgttcaattcaactcgaaaaacaaaccaggagatttgatacagaaagtcgatattcacctatgtgatgagcatggcatgatctgtgtgcggctgaaaggattttcgacgagagtgatggaggcagatatacaaaccgaaccatcaaaaatcaacgctgaaactttattgcttcagcccgtttggcaagaacaaaaggctgctaacagcttagctgcaaaaaaatatgcagagcatctcgtattcctatgtgaatatgatcatgagacgagaaaacaaattgaagcagccatcgaggatgtccatgtatacagcctggaagcaaggccttcttcagtagatgggcgtttccattcttatacagaacaagtgtttaaaaaggtacaagagatcattcgtacgaaaccgaaagacggcattctcgttcagatcgtgacctctgccgagggagaacagcaattgttttcagggttgacaggactgctgaaaacagcttgtcaggaaaatgccaaactaaccggccaaatgattgaagtcagcagtgaagaaagtggagaaagcattgctggcaaactgttagaaaatcaaatgagcagcgattcatatgtcaaatatcaaaacgggacacggtatattgctgattggcgtgaaatcaaacaggcaaaaggagacggcagcaaaccgtggaaagacaatggcgtttatctcatttcaggaggtgccggcggactaggtcatatttttgcaaaggaaattgcggaacaaacgaaaaatgcgacagtcattctggcgggccgctcacctcttagcgaaagcaaaagcaaaaagctgaaagagcttcatagcaagggggctgacatcacctaccggcaaacagatgttaccaataaaattgaagtctatcagctcattgacgacattcaaaaaagatatggccgtctgaacggtattcttcatagtgccggaatcatcaaggacagctacctggttaataaacaggcaaaagatctgcacgatgtactggcgcctaaagtaaaagggcttgtttatctagacgaagcgagtaaggatttgcctttagacttctttattctcttttcatctctttcaggaagtttagggagcattggtcagtctgactatgcggcagccaatgtatttatggatatgtatgcaggctatcgaaataggcttgccgacctcagccagcggcatgggcagacgctttctgtaaactggcctttatggagagatggaggcatgcaggtcgatcaagaaactgagaaaaggcttgtgcaacttgccggtattgttcctatgagggcggaaaaaggaattcaggcattatatcaagcacttcattcagaggcaaaccaagtaatggtgatcgaaggcgatgtgcagaaaataaaacaaaacatgctggccaaaaacgcctcagcacctatggaaaagaaggaagcagaacacatgactgaacaaataaatagcattgatgcagacagtttgctggataaagtaaaggcgatgttaaagcgagagatcgccaagctgttaaaggtcaagcttgaaacgattgacgatcatgcagagatgacggtgtatggttttgattctatctccatgactgaattcaccaaccatatcaatcgcgcctatcagttagagctgacgccaaccgtattttttgaccacccgacgattcatgcgtttggcaagcatttgtcagaagaatatcaatcggtatttgcgaagacatttgctgtgcgcgctgtatcggctcagcttcagcctgctgcgaaacaggaacaagccgtgcgtgccaaagctaaaagacgcagaaagcagcaagtcatgctgccaaacgccatacagagtgatgctgggcctgagccaattgccattgtgggcataagcgggattttccctatggcgaaagacgttgaggcgtactggaacatcttaaaagagggcaaagactgcatgacggaaatcccgaaagatcgctgggattggcgtgaatatgaaggtgatccggcgaaggaagtcaataaaacgaacgtgaaatggggcggttttattgacggtattgcagattttgatccattattctttggcatttccccgcgtgaagctgaacaaatggaacctcagcagcgcttactgctgacttacgcctggaaagcgatcgaagatgcaggatattcggcgaaaaggttgtcaggcacaaaaaccggcgtcttcatcggaacgggaaatacaggatacagctctcttctatctaaagcgaactcggcaatagaaggatcagcggcagccaatacgagcccatcggtcggtccgaaccgggtcagttatttccttaatctgcatgggccgagcgaaccggttgatacagcgtgctcaagttcactagtggcgatccaccatgccatctcttcaattgaggaaggcacttgtgacatggcattagccggcggtgtaaatacgattatccttcctgaggtgtatatcagctttgataaggcgggagcactgagcaaagaaggaaaatgcaagacgttttcaaatcaagccgatggttttgcacatggggaaggtgccggcatactgttcctgaaaaaattaaaagcggctgaagaagcgggagaccatatttacggagtcataaaaggcagtgcaatcaatcacggcggccgtgcagcctctttaacgactcccaatccgaaggcgcaggcagatgttattcagtcggcatatcaaaaagcgggaatcgacccgaaaaccgtgacctacattgaagcccacggaaccggaacggagcttggagacccggttgaaattaacggtttgaaatcagcttttaaagcattgggtgtaaatgaaggagacacatcagccaatccttactgcggattagggtctgtaaagacaaacatcggccacttatcgctggcagccggtgcagcaggagttattaaaatattattgcagcttaagcataaaaccttagtgaaaagtctgcattgcgaaaacgtgaatccatacattcagctgaaaaacagtccgttctatatcgtacgggaaacggaagaatggaaagcgctgaaaaatgaacagggagaagagcttcctcgacgggcaggtgtcagttcatttggaatcggcggagtaaacgcccacgtgattatcgaggaatatattccggaagcatccgatgagaatataccatccatcgcgccggaacatccgggtatcttcgttttatcggctaaaaatgaagcgcggctaaaagaacatgcacagcagctggcagatgcgcttgataagcaaacatatagtgacgtaaatctcgcccgaatcgcttatacactgcaagccggacgggatgcgatggaagaacgtctcgggattatttccggttccattgaggatttacagaaaaagttaaaagactttgcagcggagaaaagcggtgtggaggatgtatttaaaggcaggattgataaaggcacactccaaatgctgacagaggacgaagagattcaagaagccgtcgagaaatggatggaacggggaaagtatgcaaaattgcttgaattatgggtaaaagggcttgatgtagactggacgaaattgtatggcgagaatctgccaaagcgcatcagcttgccgacgtatcctttcgcaaaagaccgttattggatctctgatcatattgaaaaaagcggcagcattgatgcaaatcaagcagcctcccgccttggcggagccgtgctgcatccattaatgcatcaaaacacatccaatctctcggaacaaaggtttagctctatttatacgggagaagagtttttccttgctgatcatgttgtgaaaggccaacggattttgccgggagtggctcatcttgaattggcgcgggcagctgttgagcaggccgcagaggtacaaggtgtaccgcgcatcatgaagctaaagaatgcggtgtgggtgcggcctattgttgtagaggatcagccgcagcaagtacacattaggcttttaccgggagaaaatggtgagatctcttatgaaatctatggtcattcagacgttactggcgaacagtcaatcgtctacagtcaaggcagcgcggtattgaatcctgctgaaaatttgccggcggttgatttgcaatctctgcgggagcagtgtcaggaaagtcatttcagcgtaaacgaagtatacgacacctatcgaatgattggatttgaatatggtcctgcttatcgcggagtgaaaaaaatctatacagctgaacaatttgttttggcaaaattgtcattgcatccgtcagctgcagatacgctcagccaatacaaaatgcaccctgggctgatggattctgctttgcaggcgtcaagcattttgacaggagccggggataaccagctgacactgccttttgcggtccaggagcttgaagtcttcggagcatgttcgtcagaaatgtgggtatacgcaagatacagccaaggcagcaaggcaactgataaggtgcaaaagcgcgatatggatattttagatgagagcggcaatgtttgcgtacggatgaaaggattatctttcagagcagcagaaggcggctctggatcggcggaatctgatcaaacgctggcaaccctgatgtttgaagaaaaatgggtgcccaaggattttaaaaaagaaagtcctgagcctcattacgaacggcacattgtcatgctttgcgacatgaatggcctctcaaaagatcgcattgaatcaagaatgacaggagcggaatgcatcgttttggagtcattccgcgaaggacttgcagagaggttccaagattatgccgaacaagcgcttgagacggtccagggtcttctcaaaagcagacctcagggcaatgttctgatccagctgcttacctctgcacaaagaaagcagtactcattctcagggctatcggcgctccttaaaaccgccggcctggagaataaaaaactaatcggccagacgattgaaatcgattcacatgaaaatgttgaaagtgtaatagaaaaactgaaagagaataaaaggcacacagaagatcagcacatcaaatatgaaaaaggcaaacggtacatcaatgatctggatgaaatgcaaatagatgatcgggaaataagcatgccgtggagagataaaggtgtatacctcatcacgggcggcgcaggaggacttgggtttatttttgcaaaagagattgctcgccaagccgaacagcctgtgctcattctgacaggcagatccgcgttgaatgcggatcagcaggcggagcttaacgaacttcagcaattaggggctcgcgcagaatacaggcaggttgacgtgacacaaacggaagcagcctccgagcttatcacaagcattacgtctgattacgaagacttgaatggtgtcattcacagcgctgggctgattaaagataactatcttatgagcaaaaccaatgaagagctgacacaagttctcgctcctaaggtgaaagggcttgtgaatgtggatgaggcaaccgagcatcttgcgttagatttctttatcctcttttcttcaatatcaagtgttgccggcagcgcgggacaggccgattatgcaatggctaatgcatttatggacagttatgctgcttatcggaatgcgcttgtaaccgccatgtacaggcacggacaaacgttgtcaatcaattggccgctctggaaagaaggcggcatgcgcgcgaataaagaaattgaaaacatgacgttgaaaaacacaggtgtgactccaatgcggaccgagaccggcattcaagcgctgtataaaggtttggcatttggcaaagatcaagtcatcgtcatggaaggattcaaagacatgatgagggaaaagctgactcaaaagccgtcttctgatgatgtaccaatgaaaacagtgcaagtacgggtgacatctgaagcaagaatggatcaagggaatatgtttgaccacattcaagaagttttaaagcaaacaatctctcaattgctcaaaatcaaacctgaagagattgacccggacatggagtttaatcaatatggatttgattcgattacgttaactgaattcgcaaatacactgaatgagaagtgcaagctggatcttacgcctacggtcttctttgagcacgcaactgtttatgcatttgcagggtatctgtcagaagaatatccaaatgcttttacagctcaaacgcctgccaaagctgaggtgctgatgcagcctgtcgaacagaatataaaaaatatgacgttttcgactgaaaaccgctttgtaaaaccttcggtaacaccaatgcaaaaggaagctgatcacaagcctgagcctattgcgattgtggggatgagcggcgttttcccaaaggcaaaagacgttgaggaatattggaagaacctgtcatcgggcgcagattgtattacagaggttccaaaagaccgctgggattggcaggagtattacggagaccctctgaaagaagcgaataaaacaaacgtcaaatggggcggttttattgatgaagttgctgactttgatccattgttcttcggcatatctccgctggaggctgagcagatggagcctcagcagcgcctgttaatgacctatgcgtggaaggcggtagaagaagcgggacactcagcgagaagcctggcaggaaccaaaacgggcatcttcatcgggacaggaaacacagggtacagttcacttctgtcaaatgtagacatcgaaggctcagcggctgcgaatatgagtccttctgcaggaccgaatagagtcagttatttcctgaacattcatgggccgagtgaaccgatcgacactgcgtgctcaagctctttggtcgccattcatcatgcggtttgcgccattgaaaatggaaactgtgaaatggcgattgcgggaggggtcaacacggtcgtaactccgcaaggccatatcgcctatgataaagccggggcgctgagcaaagaaggaagatgcaaaacattttctgacaaagccgatggattcgcagtcagtgaaggtgccggcattctctttctgaaaaagctgacagcggctgaacgagacggtgatcatatttacggtgtcattaaaggaagtgcggtaaaccacggtggccgcgcaaattctctaacgactcctaatccgaaagctcaggcggatgtcgtaaaaacagcatatgaaaaagcgggaattgatccaagaaccgtaacttatattgaagcgcatgggactggaacagagctgggcgatccagtagaaatcaacggcttaaaagcggcatttaaagagctgtatgaaaaaacgggggacccggctgttcatggcagccattgcggacttgggtcagcgaaaacaaacatcggtcacttatcactggcggccggtgtggctggtgtcattaaagtgttattgcagctcaagcataaaacgcttgtcaaaagtctgtacagtgaaactgttaatccgtatatcagactggatgacagcccgttttatattgtgcaggaatcgagagagtggcaggcgcttcgggatgaagccggccgagagctgccgcgccgcgcaggtatcagttcgttcgggataggcggcgtcaatgcccacgtggtcattgaggaatatattccgaaagaaacaacccatcctgcaacagcaccagccgtgacagcacagcacccgggcatctttattttgtcggcaaaggatgaagatcgtctgaaagaccaagcccggcaattagcagactttatcagcaagcgatctatcactgctcgtgacctcactgatattgcttatacactccaagaggggcgtgatgcaatggaggagagattagggatcatcgctgtctcgactggggacttgctggaaaaactgaacctctttatagaagggggcaccaatgcgaagtacatgtacagaggcagagcagaaaaaggtatcgcacaaacattgagatcagatgacgaagtacagaaaacgctcaacaatagctgggagcctcacatatatgaaagactgcttgatttatgggtaaaaggcatggaaataggctggagtaaactgtatgacggcaaacagccgaaacgcatcagcctccctacctatccatttgcgaaagaacgctactggataacggatacgaaagaggaggcagccgcccatcaaacagctttaaaaacagtcgaatcagcagctttgcatccattgatacatgtcaacacatctgatttgtcagagcagcgtttcagctcggcctttacaggtgctgagttctttttcgccgatcataaggtgaagggaaaaccggttatgccgggcgtggcatatcttgagatggttcatgctgccgttacaagagcagtgagaagaaccgaagatcaacaatctgttattcacatcaaaaatgttgtgtgggtgcagccgattgtggcggatggccagcctgttcaagtggatatcagtctaaatccccagcaggacggcgagattgcttttaacgtctatacagaggctgcacacaatgatcgaaagatacattgtcaaggcagtgcttcaatccgtggggcaggagacattccagtccaggatatcagcgcgcttcaagaccaatgcagtttaagcacactctcacacgaccagtgttatgaattgtttaaggcgatcggcattgactacggacctggttttcaagggatagatcggctttacatcggccgcaatcaagccttggcagagctttctctgcctgctggtgtaactcacacactgaatgaattcgttcttcatccaagtatggccgactctgctttacaagcgtcgatcgggctaaagctgaattccggtgacgagcagctttctctgccttttgcgctgcaagagctagaaatattcagcccgtgtacaaataaaatgtgggtgtctgtgacatctcgtcctaatgaggacaaaatacagagactggatattgatttgtgtgatgaacaaggccgagtgtgtgtaagaatcaaggggattacctcaaggctgctggaagaaggcatacaaccgccagacgggccgacatcactaggaaactccaaagcaactcttaacggagcgcttcttatggcgccgatatgggatcgagtgcagctggagaagaggagcatttcgcctgctgatgagcgtgttgtcatcctcggaggggatgacaacagcagaaaagctgttcaaagggagtttccgtttgccaaggagctgtacattgagccgaacgcatcaattcatagaattacaggccagcttgaagcactcggatcgtttgaccacatcgtgtggatgtctccttctcgtgtgacagagtgcgaagtcggcgatgaaatgattgaagcccaagatcaaggcgtcattcaaatgtataggctcattaaggcaatgctttctttaggctatggacagaaggagataagctggacgatcgtgacggtgaacacacaatatgttgatcagcatgatattgtcgacccggtcgatgccggggtgcacggcctgatcggttcaatgtcaaaagaatatccaaattggcagacaaagctgatcgatgttaaaaaatacgaagacctgccgttatctcaactcctttccttgcctgccgatcaagaagggaatacgtgggcctatcgaaacaagatttggcataagcttcgtctaattccagtacacaacaatcaaccggtgcacacgaagtataagcacggaggtgtttatgttgtcataggcggagctggcggtattggtgaggcgtggagtgaatatatgatcagaacatatcaggcgcagatcgtttggattggcagaaggaaaaaggatgcagccattcaaagcaagctggacagatttgcacgtctagggcgagccccgtattacattcaagcagatgcggctaaccgagaggaattagaacgcgcgtatgaaacaatgaaacaaacacatcgtgaaatcaacggcatcatccattctgcaattgtcttacaagaccgaagcctgatgaatatgagtgaggaatgtttcagaaacgttcttgctgcaaaggttgatgtaagcgtgcgaatggctcaagttttccggcatgaaccactggattttgttttgtttttctcttccgtacaatcgtttgcaagagcttccggacaaagcaattacgctgcgggttgcagttttaaggatgcttttgcacagcggctttctcaagtatggccttgtacagtagccgtgatgaattggagttattggggaagcattggtgttgtttcatcaccggattaccaaaagagaatggctcaggcaggcataggctcaattgaagcccctgaagcaatggaagctttggaattgctgctcgggggaccgctgaagcagctagtaatgatgaaaatggcaaacgaaacgaatgatgaagcggaacagacagaagaaacgattgaagtgtacccggaaactcacggctccgccattcaaaagctgcgaagctatcacccgggtgacaacacaaagattcaacaactgttataggaggggaaacgccaatgctgaacacagaagacattctctgtaaaatgcttttcgcacaattacagtccatagggtttttcacagaaagtaaatcccagccggtattggagaatttctatggcagatggtttgaagaaagccaatcgattttagaacggcatcaatttctcaagcgaacggagaacggacatgttccaacacgctcaataggcaccatgagcgagctgtggaaagaatggaatgaacaaaaatttgacctgcttcaagacaataatatgaaagccatggtgacattggtggagacagcacttaaagccttgccggagattctgaccggcaaggcgtcagccaccgatatcctgtttccgaattcatctatggatttagtagaaggggtctataaaaacaatcaagtcgcagactattttaatgatgttcttgcagatacgttaacagcctatctgcaagaacgtctgaagcaagagcctgaggcgaagattcgaatattagaaatcggagccgggaccggcgggacaagcgcggctgtttttcaaaaattgaaagcatggcagacacatataaaagaatattgttatacagatctgtctaaagcttttttaatgcatgcagaaaataagtatggtcctgacaatccatatttgacatataaacgatttaatgtcgaggagccggcgtctgaacagcatattgatgcgggaggctacgacgcggtcatcgcggcaaatgtgcttcatgccacaaaaaatatccggcagacattgcgaaatgcaaaagcagttttgaaaaaaaacgggctgctccttttaaatgaaataagtaatcataatatatattcgcatttgacgttcggccttttagagggctggtggctgtatgaggatcctgatctccgcataccgggctgcccgggcctgtatccagacacttggaaaatggtgcttgagagtgaaggatttcgctatgtttcctttatggctgaacaatcgcatcaactcggccagcagatcattgccgctgaaagtaacggagtcgtccgtcaaaagaagagaacggaggcagaagaagatccaagccatatacaaatgaatgctgaaatcgatcattcacaggaaagcgattctctcatcgaacaaacggcacaatttgtgaagcatacgctggcaaaatcaatcaaactatcaccagaacgtattcacgaagatacgacatttgagaagtatggaattgattcgattttgcaggtgaatttcattcgtgaattagaaaaagtgacgggagagcttccaaaaaccattttatttgaacataacaacacaaaagaactcgtcgaatatttagtaaaggggcatgaaaataagcttcggacagcattgttaaaggaaaaaacgaagcctgcaaaaaatgaagctccacttcaaacagagcgtacagatcctaataagccatttacttttcatacacgccgctttgttacagagcaggaagtcacggaaactcagctagcaaataccgaaccactaaaaatagaaaagacaagtaatttgcaaggaacacattttaatgattctagtacagaagatatcgcaataatcggggtaagcgggcgctatccgatgtctaacagtttagaagagctttgggggcatttaatcgccggagacaattgtattacagaggcaccggaatccagatggcgcacatctttattgaaaacattatcaaaagatccaaaaaagccggcaaataagaaacgctatggcggatttttacaagatatagaggcatttgaccatcagctttttgaggtggagcaaaaccgggtgatggaaatgacaccggaactccgtttatgtttagaaaccgtctgggaaacgtttgaggacggcggctatacgcgaacccggctggataaattgcgggatgatgacggagtaggtgtttttatagggaatatgtataaccagtatttttggaatatcccatctttagagcaggcagtcctcagctcaaatgggggagactggcacattgcaaatcgcgtttcccacttttttaacctgaccggaccgagtatcgctgtcagctcagcatgctctagttcattaaacgccatacatcttgcgtgtgaaagcctgaaattgaaaaactgctcaatggcgattgctggaggtgtcaatttaacactcgatctctctaaatatgattctttggagcgtgccaatctgctgggaagcggcaatcaaagcaaaagttttggcaccggaaacgggcttattcccggggaaggcgtcggagctgtcctgttaaaaccactttcgaaggcgatggaagatcaggatcatatttacgctgtgatcaaaagcagttttgctaaccatagcggcggaagacagatgtatacagctccggacccgaagcagcaagcaaagttaattgtcaagtcgattcagcagtcgggcattgatccagagactatcggctatattgaatcggcggcaaatggttcggcgctgggcgatcctattgaagtaattgccttaacaaacgcgtttcaacaatatacaaacaagaaacagttttgtgcgataggctctgtcaaatccaatctggggcatttagaggcggcttccggtatttctcagctgacaaaagtgctgctgcagatgaagaaagggacgctggtgccgacaattaacgcgatgcctgtcaatccaaatattaagctggaacacacggctttctatcttcaggaacaaacagagccatggcatcgcttgaatgatcctgaaactggaaaacaattgccgcgcagaagcatgatcaattccttcggagcggggggagcctatgccaatcttattatagaagaatatatggagacggcccctgagaaagaacatatcgctccccgccagcaggaattcactgccgttttttcagccaaaacaaaatggagcctgcttagctatctagaaaatatgcaattgtttttagagaaggaagcttctctggatattgaacccgttgtacaggctttacacaggagaaaccataatttagagcataggactgcatttacagtggcatcgactcaagagctgatcgaaaaactaaaggtgttccgaacatcaagagaaagctcactccagcaaggcatctatacatcattcgatttacagccatgtgcggaatcagcatctagggatagagaaataaacgcagcagagcaatgggcacaaggggcattgattgcttttaaagaagctgatatagggaaccgaacaggctgggttcatctgcctcactatgcatttgaccataatacatcatttcatttcgatgtatcgtctatcaatgagaaatcgtcagatgttgaagacaatatcaatcagccggtcattcaagatcaattcacttatgatgagccttacgttcaaggacacgtcttcaacaatgaacgggtgcttgtcggtgccacatatggcagtctggccattgaagcattttttaacctgttccctgaggaaaacagcggccgtatcagcaaattaagttatatcagtccaattgtcatcaaacaaggcgagaccattgaacttcaggcaaagccgctgcaaaaagatcaagtcatagaactgcaaatcatgtatcgcgagccgtcctctggtttgtggaagcctgccgcaatcggacaatgcggaatcggttcttttgagcccaaaaaagtcaatatcgagaacgttaagcattcattaactaagcttcatcacatcgatcagatgtataaaaccggaaacggtcctgaatggggagagttatttaagacaattactcatctctacagagatcacaagtctatactggcaaaaattcgcctgccccaaagcgggctggcaaacgggcaccattacactgtaagcccattgatgacaaacagcgcgtacttggctatcctcagtttcttagagcagtttgacatgacaggcggcttcctgccgtttggaatcaatgatatccagtttacaaagcaaacgataaaaggggattgctggcttttgattacattggttaagaatacaggtgacatgttgctgtttgatgtagatgtgatcaatgagtcgtcagaaacagtgctgcactactcgggctactcgcttaaacagcttcgtatttcgaatcaaagaggaaatcaaaataaggccatcaaagccagcaatctgaaagctcgtatcagaagctatgtaacagataaactggcagtaaacatggccgatccgtcaaaattgtcaattgcaaaagcgcatatcatggattttggaattgattcttctcaattggttgcactgacaagggagatggaagcagagacaaagatcgaattaaatccgactctgttttttgaatatccgactattcaagagttaatcgacttttttgcggacaaacatgaagcatcttttgctcagctgtttggtgaagctcatcagcaggaagaacgcccagctcaaatcgaaaaccaaatgaaacagattccggcatacgagacgaacacggataaaacaatcgaacacgcggcagacggcatagccattatcggcatgtcgggacagtttccgaaagcaaacagcgtaacggaattttgggataaccttgtccaaggaaagaactgtgtctctgaagtgccgaaagaacgctgggactggcgcaaatatgccgcagccgataaggaagggcaatcaagccttcaatggggcggttttatagaaggaataggtgagtttgatcccctgttttttggcatatcgcctaaagaagcggcgaatatggacccacaggagtttctgctcttgatacatgcatggaaggcgatggaagatgcaggcttaacagggcaggttttatccagccgcccgacaggagtatttgtcgcagccggcaatacggatacagctgtggttccttccctaattccaaaccgtatatcctatgcacttgatgtaaaagggccaagtgaatattatgaagctgcctgttcctcagctctagtggctttgcacagagctatacaatccattcgaaacggcgaatgtgagcaagccattgtcggggctgtgaatttgctgctttcaccaaaaggctttattggcttcgactcaatgggctatttgagtgagaaagggcaggccaaatcctttcaagcagatgcaaatggctttgtcagaagtgaaggagcaggagttctcatcattaaaccattgcaaaaagccattgaagattctgatcatatttattcggttattaaaggttcaggtgtatcgcatggcggcaggggaatgtcacttcacgcgccaaatccggccggcatgaaggatgcaatgctgaaggcttatcaaggagcgcaaattgatcccaaaacggtgacctatatagaagcgcatgggatcgcctctccattggcagacgcgatagaaatagaggcgttaaagtcaggctgcagtcagctcgaattggaacttccacaggaagtacgggaggaagcgccatgttatatcagcagcttaaagccgagcatcggacacggtgaactcgtctcaggcatggctgctcttatgaaggtcagcatggcgatgaagcatcaaacaataccaggcatatccggattttcgtctttgaatgaccaggtgtcattaaagggcacccgtttccgagtgactgccgagaatcagcaatggagggatttaagtgacgatgcaggcaaaaaaattccgcgcagagcgagtatcaacagctatagctttggaggcgtaaatgcgcacgtcattttagaagaatatattcctttaccaaaaccaccggttagtatgagtgagaatggtgcccacattgtagttctttctgcaaagaatcaagacaggctaaaagcaattgctcaacagcagcttgactatgtgaataaacaacaagaactgtcattacaagattatgcttatacacttcaaaccggccgagaggaaatggaagaccgcctggcgctcgtcgtccgcagtaaagaagaactggtaatcggcttgcaagcctgcttagcagaaaaaggcgataagctgaagagttctgtacctgtctttagcggaaatgcagaaaatggctcgtcagatctcgaagccttgctggatggtccattaagagaaatggtgatcgagactttgttgtctgaaaacaaccttgaaaagatcgcgttttgctggacaaaaggggtgcaaatcccatgggaaaagctttatcaaggaaaaggtgcccgcagaataccgttgccaacctatccatttgaaaagagaagctgctggaacggctttcaagcagtagagaatacgccttctgtttcacaggatgagcgtatcaacaacagcagcgatcatcacatattagcaaatgtactagggatggctccggatgaactgcagtttcataagccattgcagcagtatggatttgattcaatttcttgcatacagttattacagcaattgcaatcaaaggtggaccctctcattgtcttgacggagcttcaagcatgccatactgttcaggacatgatggacttgatcgcaaagaaacaggaggatacatccttacaaaatgatcaagctcgcacgtttccggaattaataccgttaaatgacggcaagcgggggcgccctgtcttttggttccatggcggagtaggaggagttgaaatctatcagcaatttgcacaaaagagccagcgccctttttacggcattcaagccagaggattcatgactgattctgctcctttgcacggaattgaacaaatggcttcctattatatagagatcattcgatccatacagcctgaaggtccttatgatgtaggcggatattccttaggcgggatgattgcatatgaagtcactcgccagctgcaaagccaaggccttgctgtcaaaagcatggtgatgattgactccccatatcgttctgagacaaaagagaatgaggcatctatgaaaacgtcaatgctgcaaacaattaatacgatgctggcatcgattgcgaaacgggaaaagtttacggatgttctcatcagccgtgaagaggtggacataagcttagaggatgaagaattcctgtctgagttgattgacttggcaaaagaacgagggctaaacaaaccagataaacaaatacgtgcgcaggctcagcaaatgatgaaaacacagcgcgcctatgatttggagtcgtacactgttaagcctctccctgatcctgagacggtaaaatgttattatttccgcaacaaaagcaggtctttctttggtgatttagacacttatttcactttatcaaatgaaaaagaaccgtttgatcaagctgcctattgggaggaatgggagcggcaaattcctcatttccacctggtggatgtcgattcaagcaaccacttcatgatattaaccgaaccgaaagcgtcaacagccctgttagaattttgcgaaaagctctattcaaacaggggagtagtgaatgcgaatttccttaaggctttccggaagaaacatgaagcgagggaagaaaaagaaacagatgaattggtgaagcgctgagaaaacacaaacgccccctcttttaaaagggggcgttttgaatgttattttgaaagtgaaacagggagactttctaatcctcttaaaaagacattttttctccattgaatgtcatcaggtgcaaccgcaagttcaatatcaggaaatctcttcaaaagtgctttaaatgcaatgtggccttccagcctggcaagaggcgctcctaagcagaaatgaatgccaaaaccaaaagaaatatgtctattaggcgaccgatttatatttaatatttcggggttctcaaaaaaattcgggtcgcgattggcagatccgatgcctataaaaatcatgtctcctcttttgatcgaatgccccttatatgtaaagtcttcgatggcccaccgatttgccatcataacgacaggtgaggtgtatcgcagcaattcttcaaccgctgtagcgatcatttcaggctgctgcttgagcttctcacattccttcttgtgctgcagcaatgcgagggtgcctgagccgagtaagttaacagttgtttcaaggccggctacaacgagcaagaacagcatcgaatagagctctttttcgcttaacttgctgccgttttcctcagcatgcacaagtttgctgattaaatcgtcttttggctttattcttctgtcatggatcagcttagcgatataatctttaaattcacgaagggcctgatttgtcagctctctattaccttcagaggtatcaaccatcgcattggtccagatttgaaactgtgaccgatcttcttttgggattcccatcaattcagatataacaataaaaggcaaaggggaagcgaaggatttcatgatatccgctttattttctttttccatttcatctaaaagctgttcagcaatttgttcaatgctgccgcgcagattttcaatggttcggggagtaaatgcttgatgaacaagtgatctcaggcgggtatggtcaggtgtgtcttttgccagcatatgatcggatacaaaatcgatatcttcactaacgttgagcattttgatttgttcttggttcatcacattttttacgtctcttgtaattcgattgtcttttaaaaaggccatacaatcatcgtatcgggtaattaaccaggccggatatgtggctccgaaccgttttaattcaaatcggtgaatgggctcttcctctctaaatcgtcctaaaactgaaaaaggattgtgatgaaactctttaccatgcggatgaaacatcaatttttccatttgcattctcctcgcctaatagggtaaatagatgaatcaaattgctgaattagtttacaaaaaacagaatgatttgaaatgtaatcctgtctctaaaactatatatctatcttaggcgtcattcaatagggagaagaacgaaaaaagtgaaaaaacggctcgatataaagcagcgcctttgaacgaaagctcaaaggcgctacgctgtattattttgatgaaagtggctgtcagctgtgctggatatcaattgtatatactgcacgatctgttacgaccttcaatccttcgttttcttggtgaatatgaagctcacctaataaaggaatctcataggcattttgcggaagcggtacgtttccgtcctcagtgaatgttgttccttcgccttctaaaacaagctcttctttcgcaacataatcatcaggatgattcgtactgcgtatagccactttttgaaggtggagaacaatctgatccaagtctgatatctcttcatcatgggtcaattcaccttttctaatatcaagcgtctggccgacttttgattccagccattgagaaagctgtgtattcgtgtgtgccatcaatattcctccttttgatctacacgatactattcccaattgctgcatcttttacacgggaaagagccgccccactctttatgtatgaaacagttcgctgttgagtgccttgatatagcgtacggcagaacgctggaccgattcgtcggcattttctttgacaactttagagaaagcattgtaaagccggttgaattgaagcggttttactttggctgctatttcttcaactttggaggcgggaaggggaatgagatttgggtagctgtacataaagctgacccagtttcgatccgccgcaaccgtaatgatatctccggtcaatagacagcctttcccttcattgcccttgctccaatgcaaaacagcaccgcctttaaaatgtccgcccagtcggtaaaggtccagtcccggcttcatattgagcgtttcccctgaccagaagtgaatgtgattgcttggccttgtcacccattctttatcatcctcatggatatagatcggcgcctgaaacgcttcagcccactcaacctgagtagagtaataatgtggatgagacaaggcgatggcttgaataccgcctaattcgttgatttggtcaattgtcttttggtcaagatatgtcatgcaatcccacagcacattgaagcccttatgctgaataagatgggctgtttgtccaatcgcaaactctggttcagttttgatgctgtaaagatgctcttcttcctttttaaggatgttttgaaggtttcctttctcacgcatgtcttcaagggttgtccaagtttgtccatcgggatgaatatactgtctttcatcctcgcaaatcagacacgagttgggcggatctacagtctgtgcatgttgcacaccgcatgtattgcagatataatatggcactttcttcacttccttcatctattttccattattttaccttatgattatgaatattcaaacgaaaaaaccggcagttctgctgagagagaattgccggcttttgatgatgtttattggccgggaacggaattttctgcgttgacagcgcccgctccgtagatattcggatcttcatctttccatttgtccgtgccgtttttcaaaagctcttttacttcatcaggggtaagatccgggttttgctgaagaattaaagctgcgattcctgcgcaaatcggtgttgccatcgaggttcctgacattgtaaagtactgagaccctacacggcttgacttttggagcttatcaatataagaattcggagagcgaagggaaataatattaacacccggcgctaaaatatcgggcttttctttcccgtatactgtcgggccgcggcttgagaaggaagcgacagtatcatcatcgctgcttgcagtattgttatcgtcaagcgcacctactgtaatcaccttttcgctcacgcccgggcttgcaatggtctgcgaatcagggcctgagtttccggcagcgacacagacgacaatccctgcgctccacgcttcctcaaccgctctgactaacggatcttcctgttcatgatcatatctaagggcatcgcccccgagcgacatgctcataatatcaatcggttcatcggggttgtcctcattgtattgaatacaccactcaacaccctctataatatctgctaacgttcctgaaccctgcttgtttaatacctttacgccgatgagattggcttccggtgcaggtccgcggtattgaccggaagaggatgcaccgctgcttgcgacatcacctgcacagtgtgtgccatgaccattatcatcgtacggctctgttttttgattgaccatgtccgcgaatccgataattcttccttctagatcaggatgcgggtagattcctgtatcgacaacagcgacagtaacaccttttcctgtcagggtttgcccgtttctgacgacttccttcgcatggcttgcttcggttgccgtgtctaaaagcgctttgacttcgcggtttaaatacactttacggatattgctgcattcagagagaagggaatgtaatgctgaaggagtaacctcggcgctgcagcagttgattttgttgaagcggctttttagcttgctgcgtttttctttttgcagcacctctccagccatttgaaagccggtctcgtgacagccttcctcaaattcgataatgactgacattttttttctgttttgcaatttggtttcgaaaaatttatgcaagaagcaaggagtccatttgaagggcttgtaaagttgcaatacggtttcccgtaacggccaatctagcttgtgagcatttgctctcaccatttgtaccatagagtacccaaacatgtattttcctcctattataaggttctctgtatactctatgaacagatgataggtttggtaagtttgtttgtcctctgtaagagacagacaagagtttgtttttctgaatctttcgcattagatacgatagattcagaagctgaggaaatcattggggattgaaaaagaacgtttgttcgtattataatgtgatcatatcaaactgggaaggggagagcaaccgtatgaatttctacttgcaccgatctttggaaagccaaatgccaatcagcattatatatgaagaaagacggaacgattagtaaaagaacgattattgtgagacagaaaagcaaaacgaaaatcaaagcattttgtttttcgaaacaacagatcagaacatttttattggactctatcctctcctgtgattttgtgagaacaaataagcaaaatctctattctgcaggccggtaacagctgtccgtctcagcaaccgggcagcctgttactaaaaccctccttaaacctatatacatttatttgccaagtgaggttgttcctaccttttttgtctttcctctcaaccttttttcactcttatttgaaatgaaccgctaataaccgtgacaatcaattgattttttgaaaccgggaactttttcactgatgatattgtgtatacaatggtaagataaaacctattggctaaacctcatataatgaaccgcgccattcttatgaaaggagttaaacatgagaagatttttactaaatgtcatattagtcttagccattgtcttgttcttgagatatgttcattactcattggaaccagaaccatcaaatcagccagatacatattcaaatttcagcagcttggcagagaatgagagcccagccgattacgatatttcatataatgagaaaaaaggaagcaaagtcttaattatgtctccgcatggcggaagaattgaaggcggagtaagtgagcttgtgcgttatttcaataatgaatactctacatacctatttgaagggttgaagtcccatgataaccaaacactgcacattacaagcaccaactttgatgagccattggcaaaaaagaaaatcaaggagcatcaatatgtggtggcttttcacggatataaaggagagaacaagaatacccttgtagggggaacagaccgaaagcgggcgaaaatgattgtgagagcccttgagcggagagggttttccgctgagttagcgtcgtctaaaagcggtcttgctggattgaatgccgaaaacattaataaccaaggggaaacggggctaagtatccagctggaaatcagccgtgagcagagagaagcattttttgatgatttttattataaaaatagaaaatacacaaagaacagtgaattttatgcttatgtcagtgcgatcaaaggtgtcctggaaaaagagtattcgtaacaagcagatcagaagacaaaataagagaagatcagtagactgaaataggataaaaaaggaggcaaaacaatggcagatcatcatttttatttaaaagcgaactggccgggtaaccgtaatgatgtcggtacgatcgaaagcggaaacctgatcacatcgatttccattcctaaagaaatggatggcccgggagaagggaccaacccagatgaaatgcttctcggggcggcagcgacctgttacattattacacttgcagcgatgatggagagaagcgggctggaaaaagaagacttacagatggagtcagaaggcattgtcaacgttacaaaaggagtctttacatacaaaaagatcattcaccgtccctctgtcgtgcttaaacatgatgcttcacaagacgacgtcgcattggcgcacaaactttgtaaaaaagcggagtcgtcatgcatgatttcgcgtgcaattcaaggaaatgtcgagctgcagcttgaagcctctgtgaaactgggtggagaataaagaaaacagacggtcactcacaggccgtctgttttttatcttcagcgtgggctttcgattgatttagcacgaccacgcctgcaatgacaagcgtgagaccgaatacaccttttaaactgatggtttcgccaaaaagcaaaaacccgacaattgctgtaagcgcggtaccaacgcccgaccatgttgcatacgcgcttgataagtcaattgtttttaaagaaaagcttagaaacgtaaaagcagaaagaaatccgactatgactccggcaatgggccaggcttgtgtaaatccttctgaaagcttcaacatcgtgctcccaaacacttcagatacaatggcgagagccaaataaagcaatcctctcatcttcatcactcctttacggccaattaagtaacacgacccctgatagtaataaaagaatcccgataagccctttggcattcagatcttccttgaaccattttactccgatcactgtcgtcagcaccgtgcctgccccgctccaagtcgcataggagaggctcaggggaatatggtttaaagtcagggacagcatataaaaggcgagggaatagccaataacgaccaaagcacttggcttccactttttgaagccatcagatactttcagcatggctgctcctatcgattccgaacatatggcaatcgtgaggaatatatatcctatcaacatcatgaattctcctcactatatttttagattagaaaaaaaacttcagctagaaaaatattagtgtatgcctatgtatgagtcaagagattcattttcacacacttaaaaagacccctttttaaggggtcttttgcgtttaataataaaaagggaacggggcatacggataataggggtatccgccatacaaataaggattaaataaagcgcttcctataagcccgcctgcaaggccgccgataaacggtcctccaaaaaatccgaatggccggccaaacccataaccaaatccgggtcttccaaacccgtaaccgaacccgaacggtcttccaaacccaaatggtctcccgaatccgaacggccttccaaatattcttgtatcttcagggctgaaatgctctaactcgttcatgttttctttcctcctgtaataaagtgtagatgatgcagtgtattcaccctgcccggatttgattgggcgaatcgaggaaaaggaggatgtgaacacattgggcctgtatcagtctgactggtcaaaagcaccgccccacgcacatgcttatcatgtcaaaacaacgagagaacagggccattatcatctcatcgaagggtttactcagccggcaaacggatcaaataccgatcagcatacacattactatacagggatcacttcatttgaaaacggccattttcatcggtattacggaatctcaggaccggcgattcccttagcagatggcacacattatcatgaaatcgaagaaacgacgtatctggcctataacgagccgattgagatccagtacggaggggttgtgtacgatcccggagatgacagaagaaaaacgcatcgtcataccctgaaaggaaagacaagggaaattgtcggcaatgagccgctcggctggtagaaggatgtttaccgatgcaaaaaaagggcaaaatggataggtggttgtccatgttgaatgctataatggggggagatttataaaagagagtgatacatattgaataatacgaagcagcccgttgtcattttagtcggaccgacggcagtggggaaaaccaatttaagtattcagctagccaaatccttaaacgcggaaattatcagcggagattcgatgcagatttataaagggatggatattggaacagctaaaattaccgaacaggagatggagggagtgccccatcatctgattgacattttagatccccaagactctttctctactgccgattatcaaagcttagtaagaaataaaatcagcgagattgcaaatagaggaaagcttccgatgattgtcggcggtacagggctttatatacaatctgtgctttacgattatacatttacggaagaggcaaatgatcccgtgtttcgagagagcatgcaaatggctgctgagcgggaaggcgctgactttcttcatgccaaacttgctgcagcagatcccgaggcagcagctgcgattcatccgaataatacaagaagagtcattcgcgcactggaaattttacatacgtccggaaaaacgatgtcccagcatttgaaggaacaaaaacgagaacttctgtacaatgcagtgttaattggcctgacaatggatagagacacgctttacgaaagaattaatcagcgggtcgatttgatgatgcagtcaggccttcttccggaagtgaaacgcttatacgacaagaacgtgagagactgtcaatcaatacaggcgataggctataaagagctgtatgcatattttgacggttttgtgacactttccgatgctgtcgaacagctaaagcagaactcgaggcggtatgcgaaacgccagctgacgtggtttcgcaacaaaatgcaggtcacatggttcgatatgacaccgcctgttgatatggagctgaaaaaaaaggaaattttcacacatatagcaggaaaactcgaactttaatcgaaactgtatgatatagagaatcaaggaggacgaaacatgaaaccgattaatattcaggatcagtttttgaatcaaatccggaaagaaaatacgtatgtcactgtttttttgctgaacggctttcagttgcggggccaggtgaaaggctttgataactttaccgtattgttggaatcggaaggtaagcagcagcttatatataaacatgcgatctcaacgtttgcgccgcaaaaaaacgtccagcttgaactcgaatagatcaaaaaatgccatgtcaagacatgaggaaaggctgtcgggggttcccggcggccatttttaacatgaatccacttttgctccaagctttttgtgtaagctgaccatgccaaggcacggtctttttttatgagaacaacatacggaagtaaaaatggtatattatgtataaaatgaatttgggagtgatcgatcttgtttgaaagtgaagcagaactgagacgaatcaggattgcacttgtatggatagctgtctttttactgttcggggcgtgcgggaatcaagataccattattgaaacagacaacggcaattcagactatgaaacgcctcagcccacctcgtttccacttgaacataaccattttggcgttatggaggacggctatatcaaaatttatgagtataatgagtcccgcaatgaggtaaagctgaagaaagaatacgcggatgatgagcttgaataaaattcacaagcattcgaatttacaaagcggatgccagccgctaaactaaatacagacacagatcaaacagagggtgaaaacatgaagcataaagtgatcgtgaatcattgggaagaaatttgcgaagatgattcttgctatgaatacggaacaagtatcattgtgaacggaaaagaattaatcagagaagcgtcaattatcactgctttgaaggcggttttagaagagatcggcgcggatgttgaaatagaagaaacagtagagagcgaaaaatgctgtgatagcttaagaaaaaaaaatctagactactaagcagttttttttcatgttatgatatacatcggctaaaaacgacaccccgagtaggacgagagatgattctcgttctgctctcttttttgggccctaatgagtctgcccgtttgcctgatttgatcaaaatatgaatttttcataaaaacgaatctatatattgtgtttttgctagagggtagtatactatatatagtgttagtgatgagagattcatattttttgataggtcgtgataaaacgtggtacaaatcatatttgattcgaaaacagggaatgttcagcggtttgtgaataaaacaggctttcagcagatacgcaaggtggacgaaatggaccacgtggacactccgtttgttttggtcacctacacgacaaacttcggccaggtaccggcatcaacacaatcatttctcgaaaaatacgcccatctcttattgggagtcgctgcgagcggcaacaaagtatggggcgataactttgcaaaaagcgccgataccatttcaagacaatatcaggtgccgatcttgcacaaatttgaactcagcggcacatctaaagacgttgaattgtttactcaggaggtagaaagagttgtcacaaaatcaagtgccaaaatggatccagttaaataacgaaatcatgatccaaaaagatgggaaattccagtttgataaggataaagaagctgtacatagctattttgtagattatatcaatcaaaacacagtcttctttcacaatttaaaagagaagctggattatttggttgaaaaccaatactacgaagaggaattcttaagcctttattcttttgaagacattaaagaagtgtttaagacagcttacgctaagaagtttcgttttccttccttcatgagtgcgtttaaattctataatgactatgctttgaaaacgaatgacaagaaaaaaatcctcgagcgttatgaggaccggatctcaattgttgcgctgttcttcgctaacggcgacactgagaaagcaaaagaatatgtaaacctgatgatcaatcaagaatatcagccgagcacaccgacatttttgaatgccggcagaaaacgccgcggtgaacttgtgagctgcttcttgctcgaagttaatgattctttaaatgacatttcaagagcaatcgatatctccatgcagctttctaagcttggtggcggggtttctcttaacctgtccaagcttcgcgcgaaaggtgaagccattaaagatgttgagaatgcgacaaaaggcgttgtaggcgtcatgaagcttcttgataacgcgttccgttacgctgaccaaatgggacaaagacaaggctccggcgcggcgtatttaaacattttccaccgcgatatcaatgattttcttgatacgaaaaagatttctgcggatgaagatgtgcgtgtcaaaacgctttcgatcggtgttgtcattccggataagttcgttgagcttgcacgcgaggacaaagcggcttatgtattctacccgcacacgatttataaagagtacggccagcacatggatgagatggacatgaacgaaatgtacgacaagtttgtcgacaaccctcgggtgaaaaaggaaaaaatcaacccgcggaaactgcttgaaaaattggcgatgcttcgttctgaatcaggctatccatacatcatgttccaagataacgtcaataaagtgcatgcgaataaccatatttccaaggtcaaattttctaacctttgctctgaagtgctgcaggcatctcaagtttcttcatacacagactatgatgaagaagatgaaatcggtctggatatttcctgcaacctgggttcgcttaacattctcaatgtcatggagcataaatcaatcgaaaagacagtcaagcttgcgacagactctttaacacacgtgtctgaaacaacagacatccgtaatgcgcctgctgtaagacgggcaaacaaagcgatgaaatcaatcggcctcggtgctatgaaccttcacggctaccttgcgcaaaacggcattgcgtatgaaagtccggaagcgcgtgactttgcaaacacgttctttatgatggtgaatttctactccatccagcgttctgcggaaatcgcaaaagagaagggcgaaacgtttgatcaatatgaaggatcaacctatgcgacaggtgaatacttcgacaaatacgtttcaactgatttctcaccgaaatacgaaaaaatcgctaatctgtttgaaggtatgcatatcccgacgacagaggactggaaaaagctaaaagcatttgtcgctgaacacggtatgtatcacagctacagattatgcattgcgccgacaggctctatctcatacgttcaatcaagcacggcgtctgttatgccgattatggaacggattgaagaacgaacatacggcaactcaaaaacgtactacccaatgcctgggcttgcatctaataactggttcttctataaagaagcctacgatatggacatgttcaaggttgtggatatgatcgccactatccagcagcacattgatcagggaatcagctttacattgttcttaaaagacacaatgacgacccgagatttaaaccgaatcgatctgtatgcacatcatagaggaattaaaaccatttactatgcaagaacgaaagatactgggcaagacagctgcctttcttgtgttgtttgattaaaggagagtttatagtgacaaaaatttatgacgcagcaaactggtcaaagcatgaagacgattttacccaaatgttctataaccaaaacgtgaaacagttctggcttccggaagagattgctttaaacggcgatctcctcacatggaagtacctcggaaaaaatgagcaggacacttatatgaaggtactggccggacttacgcttcttgacacagagcaggggaatacggggatgccgatcgtggctgaacacgtagatggccaccagcggaaagcggtgctgaactttatggcgatgatggagaacgctgtccatgcgaagtcgtactctaatattttcatgacccttgcaccgactgaaacgatcaatgaagtatttgaatgggttaaacaaaataaatatttgcagaaaaaagcgcaaatgattgtcgggctttacaaagccattcaaaaagatgatgaaatttcactgttcaaagccatggttgcttccgtctatctggaaagcttccttttctacagcggtttctattatccgttatatttctacggacaaggaaaactgatgcaaagcggtgagatcattaacctgatccttcgtgacgaagcgattcacggcgtgtatgtcggtctccttgctcaggaaatttataataaacagacagaagagaaaaaagcagagcttcgtgaatttgcgatcgacctcctgaatcagttatatgaaaatgagcttgagtatacagaggacttgtacgatcaagtcgggctctcacatgatgtaaagaaattcatccgctataatgcgaataaagcgctgatgaaccttggatttgatccatacttcgaagaggaagacattaatccgatcgttttaaacggattaaacacaaaaacaaaatcgcatgacttcttctctatgaaggggaatggctataaaaaagcgacagttgagccgctcaaagatgatgacttttattttgaagatgaaaaagagcagatataatatctgctcttttcggcttgaaggttcaaatgaggaggacgcagtacccatgggaaaaatggacgaaatgattttagttgccccgcgcgatgatgtgtttaaaaaagaaagcttaaccttccagggcgtgtacagtgaagatagcagagtagcagaaatcatggctcagattgaagcggcctatcgtgaaatgagaagaggggacgcagaagaagatccgcgtttcaagcagccgataccttatgtcgtcattaagcgtgaagatgaagtttttctttacgagcggctggctggcggcggtgaatcacgtctgcacaacaagctttctctcggttttggcggccatatgaacgccatcgaaggggcagcttcatttgctgaagtcttaaagctgaacacagaccgtgagcttgaggaagaactgcaaataaatgaagaagataaacaggcgattgtcacactgggattgatcaatgatgatgaaaacagtgttggcaaagtgcatatcggtattctttctgcgcttcaattaaagcctggcgcacaagtggaagtgaaggagaaagaacaaattgcgggtaaatggatgaaagtttctgaattaaaacaggatgatatctacaaccgtctggaaacatggtcacagtttgttgttgatattcttgaataaaaaaacccggtttctcgcgatgaggagccgggtttttttatgagacgctcgtccccgtctcggctatgattctaggatcacaatagcgtcaaagccggcatttttcgctctggcagcgagggtgtctgcattgtctttggatgaaaatgcgccaatctgcactttgtataatccgtcctttaaaaggacaatcgagtcaaaacctttggcttcggcattacttgcgagcgagtcggcattcgctttgactttaaatgcgccgatttgaaccttatataaccctgagctggaagtctttttaaggttaaaggcttgctccagcccgtttgcatgtcctctcgctaagctttgaataaaactgctcgttttcagcttatttgcatcggaaacggtatcaatgaagccgttctcggtcaagagggcaggcattgccgactcccttaggacgtggaagttcgctgtttttttgccgcgatcggcaaagtcgacagcttgtatcacttcagagtgaattgtcgattgataagtcgtcgtcggggctcctacatctggataaatatagctttcaaaacctgtgcctcccccggaattaacgtgaatggacaaaaagaaatctgctccccagttatttgcggcatttgtccggtcgtttaagctgacatattggtcgcttgtccggctcagcagcagagaaacgccttcatattcattagttaatatcgtacgtaaggctaaagcgatttgcagggttaacgttttctcctgaaggccattacctgttgcgcctggatcagacccgccatggccaggatcaataaaaattttaaccatttttcatcacctcattacaggatatgaaaaaacacggcttctgcttgtacgattatcattcaactgaaaaatgaggaaataaccctttcacatccagaaattatttctcgggaaagcgcacaattcaacatgaagcgacaacagatacggtccgacatgaaatctgtgcatacgccatatgtttgtatgtactatgggttcggttaacctgcactgattcctgctggttttaagctttgcgttcatattaaatcaagcatttaaaacgtaaattgatgaggaaagctcctttcattaaagacaccgctttataaatcgaaaaaaagaaaaacacttcaggtatcttagggcgggtaatacgtttcgtacaaaaatcagcccgttgtatgaaaaagaaataatgagaaagaagctcactataatactctgacaaaatgattaaaaacaaaatctcatggtttgtccaccccatgtccgtgaatacaataagaaataaagtatttctcgggaaagcgcaggattccttattgttcccgaaaaaagcaattgtttcgacacatgataggcgtttgtcacaatcggcatccgcttgaatatcatatagagagaacagagaggtgaagatgttggagcgcgctgtgacttataaaaacaacggacagatcaacattattctgaacgggcaaaagcaggtgctgacgaatgctgaggcagaggcggaatatcaggctgcattgcaaaaaaacgaagcaaagcacggcattttgaaggaaatcgaaaaagagatgagcgcattagttgggatggaggaaatgaaacgcaacatcaaggaaatatacgcctggatttttgtgaaccaaaaacgcgcggagcaaggcttgaaggttggaaagcaagcgctgcacatgatgtttaaaggaaatccgggaacgggaaaaacgacggttgcacggctcatcggcaagctgttctttgaaatgaatgtcctgtcaaaaggccacttaatagaagcggagcgggctgacctggtcggggagtatatcggacacaccgcccaaaagacgagagatttaatcaaaaagtcattaggtggcattttgtttatagacgaagcctactcgctggcaagaggcggcgaaaaggactttgggaaagaagcgatcgacacacttgtaaagcatatggaagacaaacagcatgagtttattttgatactcgccggatattcacgggaaatggatcattttctctcgttaaatcccggactccaatcaagatttcccatctccattgattttccggattactctgtgacccagctcatggagattgcgaaacgaatgatcgatgaaagggaataccagctcagtcaagaagcggaatggaaattgaaagattacttaatgacagtgaaaagcacgacaagtcccattaaattcagcaatggacgttttgtcagaaatgtgatcgaaaaatcgatcagagcacaagccatgaggcttttaatgggagaccaatacttaaaaagcgacttgatgaccatcaaaagccaagatctttccattaaagaagaagcatctggatctgcatagacctctcagtttttgagaggtctgttttttgctcgtatttccgcttttcaaagcaatcgatttgtggtatacacatgcagggtttggtatgataatactactgcccaatatgcaaaagaaaggaacatccatttgaacgaacaagaaacgattcaggagaaagccattttagtcggatgtcagctgccgcatatcacggatgagcattttgaaaattctatggaagagctagcatctctgacgaaaacagcagacggaaaagtactgaccagcgtcacacaaaaacggaacagggctgacgccgctacatatataggaaaagggaaggtagaagagctgaaggcactcgtggaagagcttgaagctgatctcctcatctttaatgatgaactgtcgccaagtcagctgaagtcattggcaacagcaattgaagtgaagatgattgaccgcacgcaattgatattagatatttttgcaaagcgggcgagaacgagagaaggcaaacttcaaattgagctggctcagctgcaatatgcactgccgcgtctgacgggacaagggatcaacctttcccggcaaggcggaggaattggggcaagaggtcccggggaaacgaaactggaaaccgaccgccgccatatcagaaatcgcattcatgaaatcaacacacagctttccactgtcattcgccatagaagccgataccgtgaaagaagaaagaaaaacggtgtgcttcaaattgcgcttgtcggctatacaaacgcagggaaatcaacatggttcaaccgcctgacgagtgctgacagctatgaagaagacctcctgtttgccacgctggacccgatgaccagaaaaatggtcctgccaagcggctacagtgttcttctttcagatacagtaggatttattcaggatcttccgacgacattgattgctgcattccgctcaacgcttgaggaagtaaaagaagcggatttaattctgcatttaattgattcttcaaatgaggattatgcgggacatgaaaaaacagtgcttcggctgcttgaggagcttgaagcagatgatatcccgatgctgacggcttacaataaacgtgatcaaaaactgcctgattttataccgaccgccggaagggatcacattatggtcagtgcgaaatttgaggacgacgctgcagcctttaaagaagcgattcagcgctatttgcgccaagaactgttaacgtcttttgaagcacatgtgccggcaagtgaagggaagctcctttccagaatcaaatcggaaacgatggtagaccgcttctattttaatgaagaaaatgaacagtatgacatatccggctatgtccaagaagagcaaagtatcatcggtgaattaaagaagtatatgtaggaaggaaatataaagacatgtttgacacattaacacacggagaattattgaagaaaacggcaatggaagtggaagcggacattgccggcattcataaacaaatagaagaaatcagcgagcgaaatgagtggagagtgcttcaaagctatagaaaacacaaagtaagcgacactcatttcacgccgtctactggatacggctatgatgatatcggaagagacacgcttgaaagcatatatgcggatgtgtttggcggagaagcggggcttgtaaggccgcaaatcatttcaggcacacatgccatctcaattgctttgttcggtgtcctcagaccgggggacgagctcctttatatcacgggcaagccgtatgatacgctagaggaaattgtgggcgtcaggggtggagaaaacgctggttcgttaaaggattttcaaatcggctataatgcggttgatctgacgaaagacggaaagatagactatgatgcagtcgccgctgcgatcaatccgaagacaaaagtaatcggcattcagcgctcaaaaggatatgcgaatcgcccttctttcttaattagtgaaataaaagaaatgatccgttttgtaaaagaaatcaatgaaaatctgatcgtctttgtggacaactgttacggagaatttgtggaagagcttgagccttgccatgtcggagccgacctgatggcgggatctctcattaaaaatcccggcggcggccttgcgaaaacaggcggctacctcgtcggaaaagcgaaatggattgaagcttgctcataccgtatgacgtcacccggcatcggcagagaagcgggggcatctctttactcgctccaagaaatgtaccaaggcttctttttggcgcctcacgttgtgtctcaaagtttaaagggagcggtgtttacagcgagattccttgaaaaactcggcttcacttcaaacccgaaatgggatgcgaaaagaacggatttaatacaatccgttgagttttctgacagagaaaagatgattgctttttgccaggctattcaatttgcatcgccaatcaatgctcatgtgacgccttatccagcctacatgcctggatacgaggatgatgtcattatggcagcagggacgtttattcaaggagcaagcatcgaattatcagctgatggccctatccgcccgccgtatgtagcgtatgttcagggaggattaacctattcgcatgtgaagaatgccatatgcagtgcagtggattcattgatgcaaaagcaattaatttaaattttttaaaaatttctctggatttgatgttaagaatccttacatcgtattgacacataatataacatcacctataatgaaactaagttaagaaaaggaggaaattgagatgagtgataatattcgccgctcaatgcctttatttccaataggaattgtcatgcagttaactgagttatcagcaagacaaattcgatattatgaggaaaatggactgatatttccagccagaagtgaaggaaatagacgattattttcatttcatgatgtagataaactgttagaaatcaagcacctgatagaacaaggtgtaaacatggcaggaattaaacagattctggcgaaagccgaagccgagccagaacaaaaacaaaacgagaagacgaaaaaaccaatgaaacatgatctgtccgatgacgaactgagacagctcctgaaaaacgagctcatgcaagccggccgttttcaaagagggaatacattccgtcaaggcgacatgtcccgcttctttcattaatccgttagcaactgttttgctatatacatttaccttttaagaggaggaattttaccaaatggcaaagtacactagagaagatatcgaaaaattagtaaaagaagaaaacgtgaagtatatccgccttcaatttactgacattcttggaacaatcaagaatgttgagattcctgtaagccagcttggaaaagcgcttgataataaagtcatgtttgacggttcttctattgagggattcgttcgtatcgaagagtcagacatgtacctgtatccagatctaaatacatttgttatcttcccatggacagctgaaaaaggtaaagtagcacgtttcatctgtgatatttacaatccggatggcacaccttttgaaggtgacccgcgaaacaacttaaaacggattctgaaagaaatggaagacctcggcttcagtgattttaaccttgggcctgagcctgaattcttcttattcaaattggacgaaaaaggcgagccgacgcttgaactaaacgacaaaggcggatatttcgacttagctccaactgatttaggagaaaactgccgccgcgatatcgtacttgagcttgaagagatgggctttgaaatcgaagcgtctcaccacgaagtagcacctggtcagcacgaaatcgactttaaatatgctggagcagtccgctcttgtgatgacatccaaacatttaaactagttgtcaaaacaattgcccgtaaacacggcctgcatgcgacatttatgccaaaaccattgttcggtgtaaacggttcaggtatgcactgcaatctatcactcttcaaaaatggtgttaacgcattctttgacgaaaacgcagatcttcagttaagtgaaacagcgaagcacttcattgcaggtatcgtgaagcacgcaacaagctttacagcagtaacaaacccgacagtaaactcttacaaacgtcttgttcctggctatgaagcaccttgttatgtagcatggagcgcgcaaaacagaagcccgcttatccgtatcccggcttctcgcggcatcagcacacgtgttgaagtacgcagtgtagacccagctgcaaacccataccttgcacttagcgtattgcttgctgcaggattagacggaatcaaaaacaaactggaagcgccggctccaatcgaccgcaacatctatgtgatgagcaaagaagagcgcatggaaaacggaatcgttgaccttccagcaacacttgcggaagcactagaagaattcaaatcaaacgaagtcatggtcaaagcgctgggcgagcacctattcgaacacttcatcgaagcaaaagaaatcgaatgggatatgttccgcacgcaagtacatccttgggaacgcgaacagtatatgtctcagtattaatatctcaatcccttggcactaaaagtgtcaggggattttttatgttaataggtaataaattatggagcggcactgctaaaaagcagggtcacttttagtctatgtcactaataattctatgtactaaatttttaattagggaaataattccacgcttaaggaagcaatacgcataaataattcgacaaattctgtgataattccattgttcaatacttctaccagcaataataagatgagtaaggtagatgtttatcattgacatcataaccaaatgaatccataattacgttgaaatctaaatcaattttcaaaaaggagatttctatgaaaaaattgactatcttctccgggggattaggagcggttttttctgtactggctcaactgtttgcggttatagatgactcttacactttggggaatttatggtttttaggtgctttggcgggaattataaccatgcttgcttcaatccagacaaataataaaccagtcttcagcatattattaattgctagttcagtaataggtctacttggaactggtcttgtatacatcataccaacactgttcaatataataataatttataaattttcaaaagtaagccaataagccaatgggaaaattaaggttctttttttatttaacatccctttgacaaggtcggtgataaatcgcagaatgtttatgcttgcaactaatccaccagcgggggcatcggtgggcatgattatctaacgccatgtttctaggataccggaattgaaacatttgctgaggcatttcgtgaagctgatcaccaaatgaccatttccatagaggcacgtctaaagaagctatcataggaggacaatactgtgtggaaagctttaagtcaattactcaagaaacagaaaaatcaaagtccaagcgatgaagattatatacagattccagaattagaagtaaaagttttggggatgcttcacagtatcaatatagacctggttaatgtaatagcccaagcagaaaagtctaaggagtttataggacaaatcgaaggcatctggcattctatagcaaatcaattttattcactcgcccaagggtttgagaatgaggatatcaataagctttctgcggatcttgatcatgctgccgccacttgggaagctgttgctaataaagcaaaagagtttgtaacaaattcataccaagggtaaaagaaaaataagggcctgaaagggctcttttgcttatagtcatatttcccgtaagtattactttttggatttaataaattttaaagcgtgtttgtttcactgaattcatagtcaaaaggggaatgtttttatgcttggaatcaacgttgaaaaatcaaatgaaaacttaattatcaattggcagctatccaaaattgaaattccaatcaaagaaatcaatgatgtatttcttgatccaaactatgggggagaggagaaaagcgcagtaaggattgggtttccttatggctcaacagatagggtagtaattaaaacagcacgtaacacttacattttgttcaccactaatcctgctttaattatgagtaaaattgtttcttaataaacagtttatgtcccttttaaatttatctattaatgttctgtgtggtaaaatttagtgagatgatttaaggaggaggagcatttatggaagaaataaaagttagttcacatgacactagatggtattaagaaagcagtttctaaatatggtacattccctatgtttcatcatggaggatatgtcatggaagatgctacttttcatttcaaagatcctgctagtcctcaagaaattagcgatatagaacagaagctaggtgttactttccctaatgactataaagagtttttgttacagcacaatgggatggaaatgtttgatgggattgaaatacttagcttagagggaatcattgaatataatgaggttcaagatttcccagagggatacgttttaattggatatcattttgatggaagatatgtcatagacacaaacaaatcaaaaaatggattaggctatatgctatatctagactcaattgatgatattgaagatgcgattaacttagattctaatttcgagatatggtttgatatgctagtgtctttaaatggaacgaaatattgggaagtaaatccgaatctccaagagtattataaactggtttcagaataacacttcggcaaaagaaaaaattatgactaatttcaacaaccaaagaaactgcaatttgagggaagtataatgacaatttacgagcaaattaaggatgctttgaaaaataagatcaatgagttggtttcacctcaagaagtaaagaaaacccttcaagaaaaatacggaactaatccggatagcattattttatcagattattgttataaccggtataataaggggatttcttttaataagcacctctttgaatatatgaatagaagttcttacaaatacttaggtgaaaactctctttatacaggacttattttcagaaaatcaaaaggggaagataaggaagttatcgtaggcgaatgggtaaacggtgttaaatcactccgagaagcttctgttactaataaccaaataaatgatcaagccgaaatcattagtaaagaacaacttgtaaacctttataatgaatataaccaaatcctgagatatgaaatgaatgtattgaactgtaagcctacagaattgaggcatttaattggcagaatcggtgaattcatttgtgcaatccaaaccaacggcactctggcacgtcaaactaatcagcatggatttgatgttgtgagtgatggcagacggattagtgtaaaaacaacagctcaatcaagtggttttatttcgataaataaaaatacattttatgattttgatgatttttttgtagttcaatacgtaaatgatgattttaaagttattttcttcggctcaaaggaagaagtgcaaaaaataagcagaatttatggaagccaatacgaagttgaaatttcacttcttaaaaagcttaataaggaataccaattaaattaaacaatcttgttggtaacaaacatcctcttacttattgtaagaggatgtttgtttaattcttacatattttatctttgcaatctggcttacgagttgcatccacagtaaatgatcttacttcgtctttagttttgtcataaattccccatattacccctcagagaaggatagggggattattttggagaatcatattccattgcttgttcacagtcagtaatccttgagttgttctagcaagaggcaatattgttgaataagaatagttttaaagaggttattgttgtcttcatattgaaataaagattaagtatattagaggggagttgctttaatgcacataacaacaaaaaggttattgatacgtgaatttgaattcaaagattggcaagcagtatatgagtatacatctgatagtaatgtaatgaagtatatacctgaaggggtttttactgaagaagatgcaaaggcatttgtaaataaaaacaaaggtgataacgctgaaaaattccctgtcatactaagagatgaagactgtcttataggccatattgttttttataagtattttggtgaacatacatatgaaattgggtgggtgtttaatcccaattatcaaaataaagggtatgcttctgaggcagcccaagctatcttggaatatggatttaaagaaatgaacttacataggattatagctacgtgtcaacctgagaatattccctcataccgagttatgaagaagattggaatgagaagagaaggcttttttaaaaaatgtattccaaaaggcaatgaatggtgggatgaatattattacgctattttagaggaagagtggaattgaactttattgagtgcggcaatacaaacaaattatcaccctctacttagaacatattagttaaatgaaggtgatatataaagtgatatgacagtgattaaatgggattcaatgagctccggtgaattgtttttaggtgagttcactaaggatgatacctgatacgcagccataccattcgagcgttaatcattttataactgatcttttcacttttgcccacgggggaataagaccctatttaagtttgccagacgattgtttgatccgttgttgatgattgtcaggattttttgtgaaggaatatctttatatagtggttgattattcccttctggtaaaaattgatctatgttgaattgcttaacatgtcattgaactcagagaataaagtgaacctgccacagatgttcattatcttttagggggttccaaaaagaccgtattcctatcgatcgctcagagtgaaaatggtatactaaagttacaatcacaggaaggaattacaatttttttagatctacataaaatcatctgattaaccgaaagtgagaatgtgtgaatgaatttaatagggtatattgaggaaaggtttcaaaacctcgaattaattcctagcatctataatcaatggggcacaggaatccatttttgtcttggggaaaatatctatcaactcaaagcaaatgaagaattgaatttaaagatgtttcggattgtatatgaacaaacctcaatcatttttaatgaattatttgaacaaaatgatgacatattccttgtgacgaatatgtataagcacaaaaagaaagagaaatgtataagaaaattaaaggtgtatcaaccgtttctaaaatgtaaaaatcatttgaatcaaattatggtgaagacatatccctatcctttcgaaatcaataaagctgaagaatacgagatgcaacaattttccctgttatgcaaacctcgagacttacgtgtaactgaattacttaaagcagccagtaatgaggattttccacaaaaaccgaaattcggaggttactctattgattaccctgatgttttctttgtgaacattacaaaagacattattttctttatctatgatgaccgcggatgcgaagtcatagctcatgatttcaaacgaatacgtccactttatgaaaaatatcacgactgggtagaagagtataagtgcatgtaatactttttttaaaaacgatttatcaggaaaggcagaattagattatgagggccttacatacaagatgtaaacggttattgaaactaagatggtattatgtgatgatgagagatctgcatttttattagtacttgatgaaagattagtggattttgattctcaaggtggaaaccatattagtgtttatttagttactcactttgagttatctgatcaatcgtataaagatgtattaagctttaatgatgatcttttgggtatggagcataactgttcgtatgcaatggatattctaagcgttaaagaggaacttgatttcgatttcccatttaatatgcttgcaataaaaagctatgtacaagaattaataaaaatgttagggattgatatcactctgcctgaaatgaaagaaagagattttgacaaactttctcaaaactaaataaaactactatttttaaagagaacggagacttgctttcaatatgaatgttaaaaaagctgcagctgttttttcaatcactattccaattatctcagccatcttaattattaatttttttacaggatttatgtcaattccatggcaaggaatgccggtgttttttccattattactttctcctataggaatcattttagcgttcgtttcaataaagacaaataaacggtgtgctgtatatgggattgtcttaaatgcaattatgtttccatttccttttttctggtttatcggaggggctttgttatttggagtttaaaatccattaggcattacgcttatacattggtattttcgagcttgtcaaaagaaggaataaaaaaacttcagaattgcttggctttactttatgttgaaaggggtcgagtaaggtggataggaaaaaggatgaaatacaaagaaaatatagggaacaaatgagggagaagaaagaacgagaaaaagaagatggcagttcacatacttttgaaattgttgttgtgctagccattatcattttgatgtttttctttaattcagttttcaaggctttttagatattgtacagatgactttcaggatgtttgaaaaaataaccctttgagatatataccgcatgaaagtattgaaggacttatgaaaattcaagagccagttgaatcttaataattaatcaccaaataatggggatgtaaaatgaagttgtataatgaatttatcaatatagctaaaacgtttaataaagagttagacataattccattattatatggatctttaggtcttgaaaaggtaactgggttagacttttccccagaagatattgatctccttattcctttaatttttttagaggaaaagtgggaaaaactaaaaaaagtgatggaactgcatggatacaaaatggttgatttacatgagcatgaatttaagaaaactaatacaaaaataggcatttcttacattgaggatttaaaaccatttgcagatgtagactataataacctagagatttttgaagatggcggagcgaaatatcatttgctaacgattgatgattacctcaagatttataaaaagtctttattagatggttatagaagaaggaagaagaatcataaagaccaaagtaaaattaacatattgaataaattaatacggaattaatttctgtattcccttttgtttccagtctcaattaaaatttttaagattaaaataagtttgaaggaaaaatcatagtgtttaacacagccattaatcctcagacagtcaaatagccatttctactccggttgaaagcttctctatttttgcttcttatttatctttcctgtattgatatatgtatgtagggttggacttataacataaactattctggccattccgttctttcaattcatgaccgggcttgccatcagcataaatctaggctaacagtctccatacatcctgtgatcacctttatcaaactcttaaatgcaacttaccactaaccaattctttatttcgcatagatcatctttgtcatgtgtttacacaagaatctgttttggactgagacactgaatataacaaaacagtcaaaaatcaatatttaattcattctgtttaaactttctgaaaaagatgttgaaaaagtcgaaaggattttataatattaagtcaagttagtttgtttgatcaacaaactaatgaaatgaactttcattatccacaagataagatcttactaatatggatggaagggggataagagggtcgatttaatggagctaaacaatataagaaacgaaagaatgaggcttttatccttttccaggtatataaggtatgacgaaaaaagatgaattttttgcttgctgatcaccatatttttttgcactgttttgaaagcgcttttataaaagtttactgaccgtaaattcgagaaattgttataccgtttcacactgttccatattaaaggatcgaaaaggggagaaatcatgctcagtgaaaatgtaaagaagattagcatggttgaaaaagttggatatgcgtctggagattttgcttgtaatttaatttatgcaacagtgtctacgtatcttttgttcttctatacagatgtttttggtttatcggcagcagcagccggtactatgtttttagtggttagaataatcgacgctctcgctgatccttttatcggaacaatagttgacagaacgaacagcagatttggacgctttagaccgtatcttttattcggagcttttccatttgtcatactggcaatactctgttttacaacaccagacttttcggatatggggaaattaatatatgcctatataacctatgttggcttgtcgcttacatacacaacgataaacgttccatatggcgcgttaacttctgcaatgactagaaataatcaagaagttgttagtataacttctgttcgcatgttatttgcgaatcttgggggacttgtcgttgcattttttgttcccttactggctgcttatttaagcgatacttccggcaacgagtctcttggctggcaactaaccatgggtattttgggaatgataggcgggtgccttttaatcttttgttttaaaagcacaaaagagcgggtcactcttcaaaaatccgaagagaaaattaaatttacggatatatttgagcagtttcgtgttaatcgtccacttgttgtattaagtattttctttattattatttttggagtgaattccatcagtaattcggttggcatttactacgtaacgtataacttagaaagagaggatttggtgaagtggtacggtttgataggaagtttacccgctttggtcattttaccgtttattccaaggcttcatcaatttttggggaaaaagaaattactaaactatgcattattactgaatattataggcctcttagctttactgtttgttccgccaagtaatgtttacctcatacttgtctgtcgattaatcgctgctgctggaagtctcactgccgggggatatatgtgggcgcttattcctgaaacaattgaatatggagagtacaggactgggaaaagaatgggtgggctcatttacgctataatcggatttttctttaagtttggtatggccttaggaggagttgttccgggtctggttcttgataagtttggatatgtagcaaatcaggcacaaaccccggcggccttaatggggattttaattacaacaaccattattcccgtgttcttgcttgttctagctttaattgatattaatttctataacttagatgagaaaaaatataaaaacatggttcgagaattagagaatagagacaaagtttatttggatcatattgatgatttcaaggcttaaaaaagaaaataaactgaggaggagtcccaaatgaagattaccaatcccgtacttaaaggattcaatcccgatccaagtatttgtagagcaggagaggattattatatcgctgtatctacatttgagtggtttccgggagtccagatacaccactcaaaagatttagtaaattggcacttagttgcacatccattacagagagtttcacaattagacatgaaaggaaacccaaattcaggtggagtttgggcaccatgtttaagctatagtgatgggaagttttggctgatctatacggatgttaaggtagtagatggcgcatggaaagattgtcacaattatttagttacttgtgaaacgattaatggtgattggagtgagccgattaaattaaatagctcggggtttgatgcttctttgttccatgatacggatggaaaaaagtatttattaaatatgttatgggatcaccgtattgatcggcactcatttggaggaattgttatacaggaatattctgataaagagcaaaaattaatcggtaaaccaaaagttatatttgaaggaactgatagaaaactgacagaagctccgcatctttatcatatcgggaactattattatttattaactgcagaaggaggaacacggtacgaacatgctgctacaattgctcgttctgcaaatattgaggggccatatgaagttcatcccgataatccaattttaacgtcatggcatgacccaggaaatccattgcaaaaatgtggtcatgcatccattgttcaaacacatacagatgagtggtatttagctcatttaacgggacgtcctattcatcctgacgatgattcaatttttcagcagagaggatactgtcctttgggcagagaaacagctattcaaaaactttactggaaagatgaatggccctatgtagtaggtggaaaagaaggaagcttggaggtagatgcaccttctatacccgaaacaatatttgaagcaacgtacccggaagttgatgaatttgaggattcaacattaaatataaattttcaaactttaaggattccattcacgaatgaattaggttcattgactcaagcgccaaatcatttacgattattcggtcatgaatcattgacctcgacatttactcaggcatttgtagccagacgctggcaaagtctccattttgaagccgaaactgctgttgagttttatccggaaaattttcaacaagccgctgggttggtgaattactacaatacagagaactggacggctcttcaagtcacgcatgatgaagaacttgggcgcattcttgaattaacaatatgtgacaacttttctttttcacagccattaaataataaaattgttattcctcgtgaagtaaagtatgtatatttaagagtaaatattgaaaaggacaaatattattatttctattcttttaacaaagaagattggcacaaaattgacattgcactggaatcgaaaaaattatcagatgattatatccgtgggggaggattcttcacaggggcctttgtagggatgcaatgccaagataccagtggtaatcatattccggccgactttagatattttcgttataaagaaaaataatttgcacatgaaaaaggagatttctattttagaactcctttttcatatgagaaggtgccatgtcactattgcttcagaaatactcctagaataaaaaaactcatctttaaagatgagctgtccattccataaaaaattacattgtaatcatgtccagaaaatgatcaatcacaatggaggacattcctaatgccggtgcattctgtcctaaggaagatggcaataattcatagctattgcctaattgggaataaacccttgatgatacttcacttctcattgaatttaaaaccataggatgcgattcaattatgctatttcttaaaattacggcttgtgggttgaaagtatttagaatattggtaaggcctattcctaaatagaatccaaaattttgtaatgcatttaaggttccgatatcattcagatgggcgaggtttatgatatcttgataggacagttttttctctttggtctgaagagattttaataaagccttctctgaagcatacaattcccagcatcctcggtttccgcaactgcatttaggaccattaaagtctattgtcatatgtcccatttctccagagaagccgcttactcctctatataaatgattgttgataataacaccgatccctattcctgtgctgatacttacgtaaataatgttatcgtgattttttgcagctccaaatactttttctccatatgcgccagcatttgcctcattttcaataaaaacaggcacattgtacttctcttgtatcgaagattttaagtcaatatctctccagttggagttcggagtgaaaacaattttttgatctttatcaatgagtccaggcacgcaaatacctataccaataagcccgtacggagattggggcatttgcgtaataaagtgatgaatcatatcaatcaaaatgtctttcgttatttctggagaattggattccaaatggcggtattgatcaagaacgattgttccttcaaggtctgttaaaatgccattaatataatccacaccaacatctattccaacggagtatcctgcctttttattaaaaacaagcatgacaggtcttcttccgccacttgattgtccttgacctatttcaaataccatactttctttcattaacgtgtttacctgtgatgagacagttgatttatttaatccagtcatttcagataattttgctcttgaaataggtgaatttttaaggatttcttttaataataacttttgatttacttttttgacaaaggtttgatcagcgatatccacttcatccactccatttgtttaatctttaaattaagtatcaacatagtacatagcgaatcttccctttattatatctaatgtgttcataaaaaactaaaaaaaatattgaaaatactgacgaggttatataagatgaaaataagttagtttgtttaaacaacaaactaataggtgatgtacttactatatgaaataaaatgcatctgtatttgaatgaatttatttttaagggggaaatcacatggctcaatctcattccagttcaatcaactattttggaagcgcaaacaaagtggtttacgaagggaaagattcgactaatcctttagcatttaaatattataatcctcaagaagtaatcggcggaaaaacgctgaaagagcatttgcgattttctattgcctattggcatacatttactgctgatggtacagacgtttttggagcagctacgatgcaaagaccatgggatcactataaaggcatggatctagcgaagatgagagtagaagcagcatttgagatgtttgaaaaactagatgcaccattctttgcttttcatgaccgggatattgcaccagaaggcagtacgctaaaagagacaaaccaaaatttagatatgatcatgggcatgattaaagattacatgagaaatagcggcgttaagctattatggaatacagcaaacatgtttacgaatccccgtttcgtccatggtgccgcgacttcttgcaatgcagatgtgtttgcgtatgctgcagcacaagtgaaaaaagggttagaaacagcaaaagagcttggcgctgagaactatgtattttggggcggccgtgaaggatatgaaacattgttaaataccgatttaaaatttgagcttgataatttggctagatttatgcatatggcagtggattatgcgaaggaaatcgggtacacagggcagtttttgattgagccaaaaccaaaagagccgaccacccatcaatacgatacagatgcagcaacaaccattgcctttttgaagcaatatggcttagacaatcattttaaattaaatcttgaagccaatcatgccacattagccgggcatacattcgaacatgaattacgcatggcaagagtacatggtctgcttggctctgttgacgcaaaccagggtcatcctcttttaggctgggacacggatgaatttccgacggatttatattctacgacattagcaatgtacgaaatcctgcaaaatggcggccttggaagcggcggattaaactttgacgcgaaggtcagaagatcttctttcgagcctgatgatctaatatatgcccatattgcagggatggatgcatttgcaagaggattgaaagttgcccacaaattaatcgaagatcgtgtgtttgaagatgtgattcaacatcgttaccgcagctttactgaagggattggtcttgaaattatagaaggaagagctaatttccacacacttgagcaatatgcgctaaatcataaatcaattaaaaacgaatctggaagacaggagaaattaaaagcgatattgaaccaatacattttagaagtataacaggataagctccagatcctgctatcaataccaagtcactgaattacccgtcatgattcctttcctattgcttgttgttatgacgggtaacttctataattaggatttatttagagtgaatggttttttaaaagggcaaggagtgaaaaaatgaagtatgtcattggaatagatcttggaacgagtgctgttaaaaccattttagttaaccaaaacggcaaggtttgtgcagaaacgtccaaaaggtatccgctcatccaagagaaggcgggatatagtgagcaaaatcctgaagactgggttcagcaaacaattgaagcattggctgaattggtttctatatccaatgttcaagccaaggatattgacgggataagctattcgggacaaatgcatggattagtactgcttgaccaagatcgtcaggtgttacgtaatgcaattctttggaatgataccagaacaacgcctcaatgtataaggatgaccgagaaatttggcgatcatcttcttgacatcacaaaaaaccgtgttttagaagggtttacattacctaaaatgttatgggtaaaggaacatgaacctgaactttttaaaaaaactgctgtgtttttgcttccgaaagactacgtgcgattccgtatgaccggtgtcattcacaccgaatactccgatgcagcaggaactttacttttacatattactcgcaaggagtggagcaatgatatttgcaatcaaattggtatttctgcagatatttgtcctccgcttgttgaatctcatgattgtgtaggatcgctgcttccgcacgttgccgcgaagaccgggctattagaaaaaacaaaagtgtacgctgggggagcagataatgcttgcggcgctattggagcaggtatcctttcttccggaaaaacattatgcagtattgggacgtcaggggtcatactttcctacgaagaagaaaaagaaagagactttaaagggaaagtccacttttttaatcatggaaaaaaggattctttttatacgatgggcgtcacgctcgctgcaggatacagcttggactggtttaaaagaacgtttgcaccaaacgaatcgtttgagcaattattgcagggggtggaagctattccgataggagccaatggactgctatacactccttatttggttggtgaaagaacgccgcatgctgattcttctattcggggaagcttgatcggaatggatggagcccataatagaaagcattttttgagggcaataatggaaggtatcacattctctttacatgaatcaattgagctattccgcgaagcgggaaaatcagttcatactgttgtttctattggtgggggagctaaaaatgatacgtggctgcaaatgcaagctgatattttcaatacgagggtaattaagttagaaaatgaacaagggccagctatgggggctgcaatgctggctgcctttggaagcggttggtttgaatcacttgaagaatgtgcagagcagttcattcgtgaggctgctgcattttatccaaaggcgcaaaatgttcaaaaatataaaacactatttgatttgtataagaacatttacactcacacaaaggatctcaatacagctttgaagagctttcgaaaaaactaatgatgttattgtctggagatcaaccgaagaacaattaatgatcaatcatcatcaaaggcctttgataacatggctgccttcttttgaaaagatggtgagaataaggtatcgcaacctttaaacagtattggagtatccagcagacaaaacgaacgagtggaaccgtattttgtcagcgaacacttcaagaagtggggaagcttaggaatgccaatgggtaagatgtatgaaaccgcgctaacgacggtagagggatctcttgatttatgaagaaataggaaggatgttaacacacaaataacccctcacattgacgtgaaggggtgttttttattgttactatacagcggaaattttacaggctagttgcatgattttagcttgttaagcagaatggaactagactctccatcatctctttctcattctttggaaactgcattctgctaggtttgctgctttttttaacaaacagtgtttttctatttcacacagccattaaatcctctgttcgtcacataaccgctcttactccaaattgacagtttatctgattttgcttcttgctcatctagtctgaattggtctatgtattttgtgttaggctcatatacatatgctactctggccaatccctctttcaataatgtctcttgaacagatttgccgtcaacataaacgtatgctaacagtcttccatacttatctctgcgatcgcctttatcaaattccagctgtagcttaccgctgttgaccaattctttatttcgtttcgacgcatcctcaccgtatggttgaacacaagaatttggtttcttcgtctcaggtgtatcaacgagcaagtagcgaactgtgtctttctttccgttgtaaataaccttaatcgtatctccatctattgctctatctaatgtaacattgaccaatttcttctgattttttgaatgaggcgtgccagccttttgttctgtctgattatattcattagagtgagtatcttgagagacttgctccgtcccattagaatctgaatggtttttggctgcgtgatttgatccgcaagctgccaaagtaatacttaaaacgattgcgatcatactgatcaaaatcttcttcatattgattccctctttatcattttctcttttcgcgattaaacatcatcattataacgatatggacattttttgtgaatggaaaacttcaagggaacttataacactccaaattgccaatagttaacttcacaacgagatgatcaaaacatcaccatcacatagcggaaataaataatcctgaaaataatattgactgaaaatgcttttagaattatgataatatgagaaatgacaataatgtgacaaagacattactacaacataacaactaatagcttaggtttattctattggttaaaaatgtaaacggttacaaatccagaggcgaaaatctaagatagagatgactttagttttgactcaatatccacactgaaagagcttattaagtattcttaaaggcaggggaaatggatatgaatgaacatcgaaatcgaaggttgaaattaataatgatttcagcaacttttggagggcttctctttggatatgacaccggagttataaatggagctttaccttttatggcaaggccagatcagcttgatttaacacctgttacagaagggcttgttacgagtattcttttattaggtgccgcgtttggagcgttgttatgcggaagattggctgatcgatatggccgccgtaaaatgatccttaatctttcctttttatttttcctggcatcactgggaacagcgttagcacctaatgttttcatcatggcggtctttcgttttttactggggctggctgttggaggagcctcggcgatggtgccggcctttttagcagaaatggcaccgcatgaaaagagagggcgtatggtaacccaaaatgaactaatgattgttggcgggcaatttttagcatatgtttttaatgcgatcctcggtgtaacaatggcaaatacgggacatgtttggagatacatgctagtcatttgtgctgtaccggctatcatgttatttgccagtatgcttaaggtaccagaaagcccccgatggctaatctccaaaggcaaaaacagtgaggcgctgcgagttcttaaacaaattcgagaagataaacgtgcagaagctgaatgtagagaaattcaagaagcggtagaaaaagatacagcactagaaaaggcatcactcaaggacttttctacaccatggctgcgccgtcttttatggattggaatcggtgttgccatcgtgaatcaaattacaggtgtgaactcgattatgtattatggcacacaaatccttaaagaatctggttttggtacaaaagcggctttaatcgctaatattggaaatgggctgatatcagttattgcagttatatttgggatttggctggtcggaaaagtgagacggcgtccaatattattgattggtttggcagggacgactacagcgctcctattgattgcgattttctcaattgtgcttgatggatctatggcacttccttatgtagtgctttctttgaccgttttatttcttgcctttatgcaagggtgtgtaggacctgtgacttggcttgtcatagcggaaatattccctcaaaggttaagaggacttggttctgggataagtgtttttttcctttggatattaaactttgtgatcggttttgctttcccgatcttgcttagctctgtaggtttgtcttttacattctttatatttgtggctttaggtgtattggcaatcggttttgtgtacaaattcatgccggaaacaaaagggcgtacacttgaagaattagaagagcattttcgttctcgacacgatcataatactcctgaacaatcagttattgaggtataaatatgttgaaaatctctcttcttataggagggatttttttagtttcagaaaaaacaaaatccctctggtagagggattttgattcagcattttaagatgttctacacgtataatactggagttgatactttaaaaatctcgccatctcttatataaaaacgagggatgcggcggcttaatgtagacacgacttcatagttaatcgtattgagcatttcagccacttcatcaacggaaatctcggctcctttttgcttaccgtaaatcacgacttcatctccttgtttaccttcaccgttttctcctaaactgaccatgatcatatccattgttactcttcccgccactggcactcgttttccgcgatgaagaacaaacccgcgattggaaagggcacgagaatagccgtcagcatagccaatcgggagtgtagcaattacttcattaggttctgcgatgtatgtagcaccatagctaacggttcggggttctgtccgcatggttttcacataagcgatgcgtgcctttaaacttaacgcaggttcaagcttaacgagatttagttgtttaatataggctgaaggatataaaccatataagccgatacctaaacggatcatatcagcgctaaattccggaaatgcgatagctgcagccgtgttgcacatatgcacggtgggcagctcaatcccctgtttttttaaaaagctgagaaaactgatgaatttttcatgctgcagctttgtgagtgttgtgtccggttcatcagctgtcgaaaaatgtgtgaaaatccctgtccatctgaggaatttacttgcctttaaggctttcactacctctaaaagttcttcctttgtgcgtacacctaatcgtcccatgccggtatccacgttaatatgaatggccagccggttagcactcgcttctttttccaatatctcgtttgcttctttcatccaatcaacctgaaatgctgataatgttatattccaagctgctgacttctttacacaactaagggatgtaaaaccaagcacaaggataggtgctgtaatcccagctttacgtaaaacgattccttcctccacactggcaacagcgagctcactcgccccgtgttccagtgcatggcgtgccacttctatagacccgtggccataaccgttcgcttttacaacagccataattttgctcttatgtggaatatgacggcggatcgctcgcaaattctttttaacggcatcaagattgacttcgatccaaacttctcggcaaagctttatcatcaacgcttccttccttcttatggattataaataccacctattgccgcaagaataaatgttaattgttggatgattcgatcttattttattcaactttatttgaaatcattcaacagcaaatccatgtgatacgagaaggtgcctatcaatgttcgaataatagcaagtacgggatacatgaggcttgtaagtggggtgttaatggatgcggcgaccgaggattacaaaaatgattatttgttttgggacatttttttctaagggtagatgataacgagaaatctaatcaggaaatacttaccgttgttatgaacattgaagaaccttttaaatgagaagggctgaggaaattctgtaaaagataatcggttgaaaaggcagtcgattccttgttccataaacctaacatcagagtatataattatactcgtattcacaaaaatcgtttaagtaaggggtatacatgaataggggagttagttttcaaataccgaatgaatatggaaattttctatggagaatactgcagccggtagaaatagctaattataggtggcaaacgagtggggaatcttattttgttgtagaaggagagctcgatgatgaggagctttttcatgactacgaaattgttgagggggcagtttttgagcaacaattaaaaacgaatcagtactataccattttcgttgaactgaaagcatttccatatggaaaaatggttaatcaagtcaatacatatgaagagtttgctgacagtgattgcgaacttgtccttttgatagcagataatagctacgtttcgatttactgtaaaaacaaaaatatcattgaaaaactttacttcaatgctttacagcatgattttgaagacgttcaatttataactgatgaaaatgacacaagaacaagccttactgtatgatactcaataaaaattaaaggagctagtacatgacaatgcaaattaaaatcaagtatctagatgaaacacaaacaagaatcagcaaaattgagcagggagactggattgatcttcgggcagctgaagatgtaacaatcaaaaaagatgaatttaagcttgtcccattaggtgttgcaatggagctgcctgaaggttacgaagcacatgtcgtccctcgttcaagtacatataagaactttggcgttattcaaacaaattcaatgggtgttatcgatgagtcatataagggagacaacgatttctggttctttcctgcttatgcattgcgtgatactgaaattaagaagggtgatcgtatctgccagtttagaatcatgaagaaaatgccggcggttgaattggttgaagtcgagcatttgggaaacgaggatagaggaggactcggttcaacaggtacgaagtaaacaaaataaatccttggctgtcttcatgctgtgtgattgatcaatggaggtttcagccaaggtacatataaatattatgtataaaatgaatattttaatacgaaggatttaattaaaaacaaagtttaaaaagggaagttttgaaaaagtgaaatagtaataactaaagtcgataaagaacctaaagatgtcaaagaaacaatttttctggtgctttgcttttttgaaggtttacttagctcgtggataactgccccccataaaagcatggatgctaaaattataatacttatatacataaagatgctccttttattatatttacagtttttacatttttatcgattttaccacatttaggattgagttgtcgatgaaacaagcatctctataaagaaatacttttatctaaatttttataaataggggaaggcaactaaaaactagtaatgccactaataataagccaagttaaatgacttgtgttcattaataattgaattttacagcagccatgagcacaaaaaaatctgagttcgtcgataaatatcataaaaaagcccccggtatgtcgccagggaataaatagacgtttaagagatttagtgatgttttttatatgattcgacaaaatcataataatgatcatcgtcatcataatactttttttcgtaatgataatcgtgatcatcgtaatactttttatcatggtcatcatactttttgtcgtaatcataatgttttttatcatgatcataatacttgtcgcaatcataatgcttcttatcattgtcgtaatactttttgtaatatgtttttttccaagtataatactcttctttatattttttataataacccaattaaattcctcctttatgttattcgaatttaatttatgaagtttaaatgatatggtatggtcaaatgaaataagaatagtaaaaagaggctgtttaaaacactttctgaaaaacaaaacggatagctgtttatgaaaataagagcgagagagagcactcaatcactgtaaaataatagtaaagtgtatagagagattagtatacgtaaaaagggactttctcattgaagaatatttgaacgttatggttaagattcaagagctctatgatgtgatttttcacactgcttttgaaggatttagagttagacatcaaaaacaaacagcaaaaccggctagaaacagatcatataaggaatgaaccgctgccaaatatcataaaaaagttgttaatgatcaaatgaatgaaattagagagaatttattttaaagaaagcccaattgcacatggacaaatgacaattgatattgaggtaaaatacaatgcattaaatcagaaaaagctattggaggatttaatgtgtttagacaatttccaatttggtatacacaaacacctgactatttgaatttttatgtaccgcaatatcaaaccatttcgtataatcctcaacaatgttatcaacggtgtatgtaccaaactggcggtaactatgagctatgtgacagactatgttatggagaaatacaggtgtaaaagagggggattaactcctctttaaacacacagtgagtggaataagatcctcactttatctgcaagtgcttagtatttgcgataatattgcattcgtaataaattatgcttagcaactgaaaatgaaagaaggatatgaatagtcatgacgcaattcgataaacaatacaattcaattataaaggatattatcaataatggaatctcagacgaagagtttgatgtaagaaccaagtgggactcagatggaacaccggcacatactctaagtgtaatcagtaagcaaatgagattcgacaactcagaggttccgattttaacgacaaaaaaggttgcctggaaaacagccattaaagagttgctctggatttggcagctgaaatctaatgatgttaatgatttaaacatgatgggcgtccatatttgggatcagtggaaacaagaagacggaaccatcggacatgcatatggatttcagctggggaagaaaaacagaagtctaaatggagaaaaagtggatcaggtagactatcttcttcatcaattgaagaacaatccatcttcacgcagacacattacaatgctgtggaatcctgatgaattagacgcaatggccttaacgccatgtgtatacgagacacaatggtacgttaaacatgggaaactccaccttgaggtaagagcacggagcaatgatatggcattgggaaatccattcaatgtattccagtataatgtgttgcagcgcatgattgctcaagtgactggttatgagcttggtgaatatatctttaacattggggattgccatgtgtacacacgtcatatagacaatttgaaaattcaaatggaaagagaacagtttgaagcacctgaactatggatcaatcctgaagtgaaagatttttatgactttaccattgatgatttcaagttaatcaactataaacatggggacaagcttttatttgaggtagcggtttaatgctgcctttttattgtgcagtgaatagatagcaggtatcctaatttcattaagcaatctggaagatgaataaaaattgaaggacaaacacgtataatacataaaaaagattaactctacagttaatcttttttattcagaagaaaatatcctaactttgaaactaaatacaaagtaaaagcaatcattacagttctagatattacaattccatgaatagctagatcatatccagcaggtatcaacgcatttgtattacacataaaatatatagatattagaagtgctacaataactaaaatcattccaaaaagacttgttttttcatatttcataccaatttccacccttattaaagttaggtttaaacaaaagagctgaagaaacgaactatgaccagtatgctccaaggaaaaccgccagacaatgctggcggctttttgctgcttcgtttatttattaacagagatcgtaacgttatttcctgcaactgaaacctttgcgaaatcctgtgtatctaccacaggagtgacggctttattgtcgatagtgatgttgttaaaagaggtcgaaaaggttgctttgatcgcatcacgctggctttcatacgaaacagccgcggtagcaagtgttttccattttgaaatcgtgccgatgttggttccttgaatttctgtgataatccgtccggtgtagccgtcattgttcgttccccaaagggtcatgcgcgtattgccgcttaaatttttatagattgtcatttggactgtgcttccagggcggaagcctttattgtatgtgaatttgtcttttccttcgatgtacgtttcttcatttttggacccaaccttcatgaggggcttccagacgttgtattgtttgctgtactgaagcccgatatcggcttcagttccgcttgttgccctaaagccagaataaatatagggagtagagaccgagtcgttgtttttgacagtttcaggaagcacgattttagctgtaaaaacggcgcccgtactgttcaggtagacacggccgccgattccgttaggcagctcggatgctgcttttgcgacttgagcgtctgccgcgggtaaacctggtatacctgatgaaagggttccgaaaagaactgctgttcctactgcacctgcaatcaatacttttttcaccaaaattcccccttttgatagtggtttcgccatttattataccttattttggaactggatttacgtatataaatcgacaaaatatttcattttgaatgatgtaaggtcgaaacgcttcgccaatctgaaagctatatacctttatcagaggaaagaatgagatcacattcgttttaaccgatttgaaattttcctcaaaataaaagtacaaatgcttaaagaaacgattattaaaagaatgcccgctatcgtttccaagcctgtaaaaaagaggtgacgtttcatcaatgtctgtccttgtaaaatgataaaagcacagataccgactaagaaaagaaaacaaatacttaggattgctaacgctttacgtgagtatgttttcatttcatctttaaaatacagcaatacgaaaataaagcagataacattggctattgttctaatcacctcaaagcttttcatgacaactgatataaatagacaaagtaaaatgagataaaatacgatgtttctatacaaaaaacctctccttttatgtaggatcctcaaagagtttataaaagtttctttgtaactgcaataaattgaatgcgctcacttatgaactaactaaactatgtactaaatattcactattctttttcagattcagtcaccaaggttttcatagaaagggaagcttcagaaatatacatatagtgcacaaacaaaaaagacccggcaatagccgggggaaagtaaaaacgaggagatgttaatggcgtttagtagtgttttttatgctttttatactctacaacataatcatagtcttttttatcgtgatcataatattttttatcatagtcatcatattttttgtcgtaatcacagtcataatcttttttatcatattcgtaatacttcttataatacgtttttttgaccgtataatactcttctttgtattttttgtaataacccatatatactcctcctttatttttactacgctttattatacggcgagtagattttgcggcttggacagttaaaatcatagaaggaaaaaagggctgtccaaatgatagaaaaagacagatgacacaaaaacaaatcaaaataaagagccgatttttcatcggcccaaacgatttatcctacatttgtttgtcttctttgttttctgagtcattttttctgatatcctgagtcagtccgcttgttgcttgtttaaattctgataaggcttttcctgctgcacggccaagcgccggcagtttatcaggcccaaatactaaaaaacccacaaacaaaataacgagtatttttgtgaagcttaattccatatccttttccccctgattgaagtacaaccttttaaacaaattataagagatagcagtacaaatgggaatgcatttattttgaacattttaaaaccagcacaaagacggattcataaaacggctgctgctgaatataatgtccaatgccacctgcctaagaagcaggaggcaggctggatcaattatgtagctctgccggaaatgatacaaacgtagcggctatcattgacatagaggagtggtgtagctgatgagattcactaaggtagttggatttttgtctgttttagggttggctgcggtttttccattaacggcacaagcagaaaaagccggaactgcgggggctggagagtgggataagttggggacttacacatatacttactcaagtccgacggtatactcgaccggaggagattttagagtgtgcctttcaggaagcactcctttttctgtttcactgcacttatatgaggatgatcccggtgacaatcctgatgattatgtaggggcaaactatttttcacccggagaatgccacacctttggcagtattggaaaatttgtagatgggagcaataacaaggccgagttctttgttaccgattactctggtaaatctaaaactgttacgttttatgattgatggactcaaattgtgaagtataacccttggaaaaaaacaaaaaagagagatacctctctcttttttattcttcgacagccttacgaagccgttcatttacaatgccagtccagccgccatccatcttaccgcgaacgacggagcttttctcgtttgctttgccgatcacttcattcggctctttccagccgctgtgaataagggtaaaccctgtcttttcccccaagtcttctaattgaaaggtaacgacccatccttctgtatcccattcaaaagaaagttcagttggagcttgaacagccaaaactttacaaggggacggcccaaacggcgattgtaagtgaaattcttgtccttctttgagctgaaagtcattgggcataaaccacttggcaatgccttctgaagtagagactgtctcccagactttctgaatgggagcctccagagtaatgctttttgtaatatccggtaatgcattttcgttgttttgagccatttcgtttacctcttgacatatgatgttttttcaattcaatcatataataactaataagatcatgtccatagcgtgcattatttatgctagagctgctgttgaacagcgtgtcagtcgccagtctgatctgtgaatgggagaattctgcatgcgcgaaaaagagagagaggtgtatgttgtcatttcgttcattcttgtttgcagccgcaactgttatgtttgaactgggattcctgttcagccaatttattttgcgatttttgttttaatagtaaatgagccattttctaaaacaggaggttttttatgcttggaaaaatcaaagcagccattgataatagtccagggaagccggccagaattttagttagtgaaaaagcgtttcagcaattagaggaagaaatgcgctttgtttacgtttccaaaccgaaaacgataatggggattcctgtggaagtttcagatcaggcagaaagcttcaagctggaattttagttttcccagactgctaaaaggctcattttgtgttaattatgcaaaatggtcaggttgatttctttaaaagcatgatgaaatgttcatcatgcttttttattgagaaaaaagacgaacataaaaaataggtatacgggaaaaataatcctattagagagaggggaactgacagatggataacatgatatcaacacttactgactggaatgtgtggtttcaagcgttagtagtatttctcgttccatatgtaatctataaagtgtttacttggattcatgtataagaaggtgcaatgatgaggtggcggaacaatcagtacaaaacacagaagcagcataaatcagattattcgacagctgaaaagcaggatcaggatgtgttaaccggtaacatcggatacgacttagaacatgtaaaaagaaaaataggacataacggggacgttcatttccgtgagcttgaaatcactcaattacatgtgaaagcggcattgatctttgttgaaggactgtctgatcaggacttgattaataaaggactatcagtgttagtcatgaatcaacctaatcaggtaagcgatgaaatttctcaatccggcaaaggtattttaacttcgaaacagataaaaaatcaaatcgtatcaatcggtgatgtcatagattcagagaaaatcagtgatatcgtgttgaatgttttcatgggttcgacagcgcttctcatcgatggaataccgcaggcctttcttctgggaactgtaaaaaaacaaaatcgaagtatcgaggagccgctttcagaagcgcttgtcagagggccgcgcacaggctttacagaagagttgagtacgaatacagctcttttgagacagcaaggaaaaaatgatcaattaacattgcagagatttgaagtaggaacacgattaaaaaaggatttaattatcgcttatatgaatgacattgcagatccaaaagtagtcgaggaagtaagaaaaagagtgagagggattgagatcgatcatttgccggagtcaggctacgttgaacagttaattgaggataattatttgagcccgttcccgcaagtacagagtacagaacgtcctgatcgcgtcataagcggattaatggaaggaagagtagctattctgcttgacggcactccgtttgctttgattgttccagtcactttcagcatgatgcttcaatcgcctgaagattattatgaacggtggttcccgagctcgctcatcagattgctgaggttcatcgcagcaatgataacgttattcgcacccgctttatatatatcatttatttcttttcatcctgggttaattccgaccaagctggcgatttcaatttccgggacgcgccaaggtgttccgttcccatctctgattgaagccttatttatggaagtcgcgattgaaattttaagagaggcggggcttcgtttgccaaaaccaattggacccgcaataggcatagttggcggattaatcatcggggaagcagctgtgcaggcggggattgtcagtccaatcatggtcattgttgttgcgctcacagcaatttcttcatttgccatcccgcattatagcacaggtatagcacttcggatgcttcggtttggcgcgatgttttgtgcggcggtgtttggattgtttggagtcattatgtattatctgctgctaagcagccatgtcgtaaagctaaagagctttggtgtgccatacgcaagtccggcagtgccctatcacttaaaagattggaaagactttgttatcagaatgcctcttttagtcatgaagcgccggcctaaaatgatgaatacagataatacaaaacgggtgaagtgatgaactcgacaggatggtgataaagtctcatgttcagcccaaccagtaaaatcacaaccgctcaggcaacgattatcatcattaattatatgcttgctgccggagttcttacgctccctcggacagtaacagaacaaacacaatctcctgatggatggatttcagttttattaggcggggtcctagcggtaatagccgggatgattatagctaaattaagccagcagtatcctaaggagaccttttatgaatactcccgacatattgtaggaaaatggctcgggcatctgatcagtattgtttttattacttattttctggcactcggtgcatttgaagtcagagtcatgtccgaaatcgtggatttttttctcctcgaagggacaccttcttgggccatcattatgacagttctttggattgggctttattcaattacacaaggcctagatccgattgcacggctttttgaaatgatttttccgattacggtcatcatctttttaacgatagccctcatgagtttaggcatatttgagatcaacaatttgcgccctgtattaggtgatggaatcatgccggttcttagaggtgtaaagacaacgaacctttcatttacatgttcagaaattatgttcattttagtagcatttatgaaaaagccgaaaaatgcggtgaaagcagttgtgatcgggacaggcgttgtgaccagtttttatatgattacgatgattatggtcatcggtgcactatcagttgagggagttgtgacgagaacatggccggggcttgacctgatgagaagttttgaaatacctggtttaatatttgaacggtttgaatcatttctgcttgtgatttggattatgcagctttttgccacgtttattatcactttttatgcagcttccctgggagtctcacaagtttttaaaaagaaacccctttcatgtatgtttgggctgcttcctgttatatatatcctctcttgcatgccgaaaaatgaaaatgacgtctttatattgggcgatacggtcagtcatatcgctttgtatatatttggcgctttgccgattttgctgttagtcatttcgaaatggaggaaaagaggtgaaaagtaaactaaaacgtcaattgcctgctatggtcatagtatgtctgctgatgatttgcgtaacaggatgctggagcagtcgggaaatagaagatctgggtctcacattcgctatcgcaattgataaaggaaaagaaacgaacactgaaaaagagttaaaagaagagggcgggagctatccgaaaaaagacaacattacgctgacctatcaatttgttaatgaaaaagcggcaggcgcgggcacaagcgggggaggcggtagcggacaaggagcgcaaaaagcgtacattaatataagtgaaacaggggattcattacagcagatcggaagtgaggttgcattaagacgggaccgagaagtgtttagcccgcatttaaaagttgttgtcatgagtgaagatgtgctgcacacatttcctatcgacgaaatgctggatcaattttttcgtgataatgaaatcaggctgagctgtcttgttttatctgctaaaggggaagcaagagacgctctccagctgaaagagaacggagaaattccggcatttcggctgattggattaggtgaaaatgaacataaagtttccagaattcttccccctatgacactcgcgaaactaattggaaaactgcattctggcagcagctttttactgcaaaatgtggttgcggcgaatggagcggtcaagtattccggagcagctgtaatcaacggaaaatcgaaaaaaatgataggcaccttaaatgaatatgaaactgaggggattacatggattagaggagaagggaaaggcggagttgtcaaaagtcatgataaaaagagccaacagacgttagcgtacgatatcaataaaatcaaaagcagaattcagccaatcgtaaaagggaaagatatttcattccatgtcgatattgaatcagaaggcgatttggttgaaaactggaacacaaaagaggcgttggacacccagtttatagatcgtctcgaaacgactattgaaaacgaggtaaagaaaatagttggtcaggtattaaaaaaaattcagcatgattataaagcagatgttgcgggttttgatgaatcttttagacttacatatcctcacttatggaaaagggtgaaaaataactgggatgacaccttcagtaaagccgacatcacatacagtgtgaacgtcacaattactcatttcggcacggttaaaactcagtaatgaatcccaaggaagagaaggaaacctctcttctcttttttatgcatttattaggataaagatactttttttggagagatatacacttttcaaatcgaccaatatgctaatataggaattgcttgaaatagaagggagaaggggctgtgaggcagaaaccgatttatgtagaaatcgaaatgaaatctgatctggatacactctgggaatatacacaaaacccatcactgcataaggaatgggatctccggttttcaaatattacgtatttgaatagtcagccatgcgaaaaacagaagtttctttacgaaacaagggtaggctttggattaaaggtgtcaggtacaggagaaaccgtcggtgttttcaacaaatgttcatctgaaaggtcttcttcactggcttttggctctgatcatccattatctctgattcggcatggaagcggctactggaagtatatacagagagaaaatgggaaaatgacgtttttaacacagtaccaatacaaaacagcctacggactgctgggaagatggattgatcgtttattatttcggccgctgcttggctgggcgactgcctggagctttgatgcattaaggctttgggtagagcaaaataaacatccgaagcgcttcattcgatctgctatcatctatgtgttcatgtgtctgtttttcagcctgttttggttctatcaaggctttgcaggtgttaagacaagcatattgacaggaacagcggagataggcttagctattttgtggctgcttcctttaaaaagaaaatggatcattcatggtgtccaggcttgtatttttgctgggtttgcttgtctaggttccgaaatattcatgtgggttctattgagtgtgttttccgctgcaagcggcgctcttagcctgcagctccccagtgccaggcgcacaaaacgaaagagaaagaagtgacattgtgagttcgatttatgaaaaatcaattattaactatcatttgctgcatcccaagctgcagaaacggtaccaattagacgggtctcatacattcagcgggacgggaacgatgtcagaaataagcggaggctcttttctggttagaatgctgttaaagctgggtgtttttttcagatgcttcttttcagaaagaggcaaagacattccatttacaatacaaaatagaacttgtcttttgaaatcgcaacatacaggaatagaatggaatcgtacatttttctttaaaggcaaaaaacgtttctttgatgcgttaatgatatatgacgagaaagaaaatagaatacttgatttcttcggcaaacctcatctgctgctgtctgttttgacgttcgaggcatctcttgacggctctcttacgatcacatcgggaaagcaatggctattgatatgcggaaaaagaatcccgctgccgaaatggctgaccggtacatccgaagtttgcgaaacgtttgatgaaaaaaagaattgtttcaccattgaagtgcatgtgcaaaatacaattcttggcactcttttcttttataagggaacgtttcaggaggaagagagagaatcatgaaacgaaatggcatagtcagtgcgctttgttttattggatttcttgcagcagaagcaccggatatttcagtggcagaggcactcgttttgttatccattctatttttcgtgccgggaatttttccttttgtttttcgtcaatctccggttcgtgctgctcagtttatggaaaacgggctaatccagtgctatcctgtagccgcattctttgcggtgctggctctagtgacggaggttgggggtttcgcacttatctggtggatgtacacagtttttaatgcattgtatgcgatcctccgcctttgggaaacaaagatacatagaatcgaagagacatcagttttgttcggtcttatttatttggcgggaggaggattttggttttttgcttatgctgcccatttgcagatcatgcaatttggccctctcatcattttgctgactgctgtccactttcactattctgcttttctgatcccgatcttcaacggtttactcggcagaaccattagaaaacatcggatgttgtacagttggataacatgggtgattttgctttcgccccttcttatcgcactgggcatcacatattcaaaaacacttgatgtcattgcggttagcatttatatggcggcgatttatcttcatgcatttttggtgttcacggcagcttttcgcaccaagacggggacatttcttattcggctttcttccgctgttttaatgataacgattgctttctcgatgatttattcatttggtgtctttcggcaagaagttacattgaccatcaatcagatgatttggattcacggttttgtcaacgcgtttggtgttatcttgcccgctctcatagggtggagaatagaggatgcgaaaccttttgatgcagacagtgtaaagacattcagccgtatctacggaaaaagaaagattggagaagaatttttagctaacattcaagctgaaaataacgctcggtacagcggacttgtggatgatatgggcagcctgcgttcaaaagatttttcaccagaaaaactggcgccgctcattctttcgttttatgaacaaaccatcgaatacaatattaaagcaaaagtaacatggagcacgtggtttcggccgcttgcaattatttacgaatggttcagcagaagaatcggccaaatacatctttcgacgaaccctgactggtataggatgtacagcaagataaaaggtgttcattcgaaaaaagacggaagggaaagagtacgtgcctggattagaacaaatgaaaaaaacgaaaccatttttaccgctctttattcagtgtatcgttcaaatggagaggggtatatgaatatttctttaccgcttccattcagcagcatgacaggtattttaaaaccatatcatcatcaggagaagctggttttaacaagcaggcggagaaaaagcagagcgggggatgaggggatttatctgcaaacaagagcgggaacttgtccgcttcctttatctgaaacctttctgatagaagctgtacatgacaacaaattaaccgctgttcatcatatgtggctgtttggaataaaatttctaactgttcattacagcattacacatattaaccagcctattgaaagaacctaacacaaagaagaagcttcgtctgccagttgtaatgagatgaactgttttaaaattctgcaccgcatcaagacaggaaaggaagggtttatggtgttttatatcagtttatttctgattctttggctggctgctgggtttgcagtgggaatgaaacaagtgtatgtcgatcagctgtttgataaagctgtgatcgaaagactggaaaaagaagcgaatgatcatggacatgctgaccggatgatcaaacagcgcgtcctttatattgcagcagtgacagtaagcgggtttatttctgtttattatgaaatgaaaacaatcccgcaaaggcgaaacataagaaaaattgaaaaaaacatcatgaaattaaatcaagcaaaaaaacgaagaatgaagagaaaataaaaagtgcacaggccaaagggcaggtgcatttttgttttgtatggaaaatgggggaggtggtgccagcttacttttcataaattcaaaaatgagaagaacagcgcccgggctaatggtatataatattgtgaatttaacaaaaatttaacaaggaggacgagagaattcgtgctaaagcctcaaagagacctacattctgttgatttggacttagaggcggagtagatgaaaccggccaaagtatccctgctccgccgtttgctccattccttgaagcatgttgattgtaacatagccaaacgttttccatcaactattaaaattgtaaaattattgatgatttttatggtgtttactccgatttcttcaatttatgctgaagatgtatatcagaattttgaggaattaaaaaacaatgaagatccttctgattatggcgttgttacgaaagaaaccggaagccctgttcttgttttagctattcacggaggaggtattgaaggcgggacaagtgaagtagcgagagagctcagcaaagagtactcgatgtatttatttgaaggcttaaaatcggcaggaaactcagtcctgcacattacgagcacacactttgatgaacctcgggcccttaaaatgacgggaaatcatgaatatgtcatttcattacacgggtacgcagaagaagatcagcagatcgaagtcggcggtacagatcgcgtaagagcggcagatttagttgagaaattgcagcatgccggttttcctgctgtattgctcaatatggaccatccgcatgcgggcgttagtccgaataacattgcaaataaatcaaaaacaggtttaagtattcagatagaaatgagcacagggtttcgaaagtctttgttcggcatcttttctttaaaaagcagagctgttactcaaaatgagaggttttatgagtttacagaagtgatgttccgttttctcaaaaatagctactgaaaaataggaggcgataagacagcctcctattccttatgcttctctttcgtttcgggaaacagctcgtccgcggcttccgtttgatactgcaacgtgttatctctcgctgacagttcatttcggaaattttcatcaagcacatttttcagtaaataccgatgaaaaaagtattcaaaaacagtaagacaggcagcggaaaggagagccgctccaaatggtgagaaatcgtttcttgtttgggttaaaacaaatacccaaagaataacgaatgaaaggccaaagtcagccaatgaagctgtaatattgtttgttctgggtaagacgagcatgtcaccagaaagataggaaacaaaacctaagaaaagtgcaataaacatcacacttaaaaaggatgcgtgatagactctgtccaaaatcacatataaaagggcgagagtgaaagcaatctttgaagcaagcgcaatgatatgtttcatttgaccacctaaattgttattttttgaagaaaattcttgggcgtaaacaaatgataaataatgcaattcaaaaccattcataatggtcatgttactattttaaacagtccgtttttgtttacactggtatttttttcagctgtatgaaactttcttatgaaaaaagtcgtatatgtggatgatcagctttcaaggggggaatgatttgtggagataaaaggaatcaatcacttgctattttcagtttcgcatttggatacatcgattgatttttatcaaaaagtgtttggtgcaaagcttttggtaaagggaagaacaactgcatattttgatatgaacggcatctggctagcgcttaatgaagaaccagacatcccgagaaatgacattaagctttcttatacccatattgcttttacaattgaagatcatgaatttgaggagatgtcagctaaattaaaaagacttcatgtcaatattctgcctggcagagaacgagatgaacgcgatcgaaaatcaatttattttaccgaccctgacggccacaaatttgaatttcataccggaacccttcaagacaggcttcgatattacaaacaagaaaaaacgcatatgcacttttatgatgaaacggccttttgatagcacaaccatatttcatataaggttaaatttaaagaagggtgttggtggagactttatgtttggggaaggtttctacccgacttgttcaacgatgccatatcttttgaactgcacaagtgattgggtgaaggtgaaattgaaatacacattacattacattttatatgaagaaagcgagctgttttatcaaatgttgaactaattaaactatgtactaaattttcagtatatttcaattgctttgccccttaataaatataaaaccgcatccttccacgacctaaaaaatgaaacgtttttaagaagatggcgtctaatattctaaatgttcatattttgataaaagtttcctaaaggaaagaaaatttcttgacttcaacaatcttttggtggataattatggtgtaaacatgatgttctttttcctcctattcgggctcgcacccaaaagtcagggcgagcctgctttttttgaacaacaaaccccctctccgtaaaggaagagggggttattttatgcatctgatagatcaatagattaatggacggttctgaacacgccaatcactttccctagaatgctgacattctgcaaaatgataggttccatcgttgggttctcaggctgcaagcgaatgtgggtatcctctttatagaatcgttttacagttgcttcatcatcttctgtcatcgcaactacaatttccccattgttcgctgtgttttgctgtttaacgatgacatagtccttatcgagaataccagcatctatcatactgtctcccataatctccagcataaatacatgctcgtctggaggaaccatgcggtcagggagcggaaaatattcttcaatattttctactgctgtaataggagatcccgccgtgactttcccgatgaccggtacattaacgacctggctttgcggaatgtctacttcttcatcaagaatttctattgctcttggttttgtcggatctcgtctgatcagcccttttgtttccaaacgggccaaatggccgtggacagtagaactggacgcaagcccgacagcctctccgatctctctcacggaaggcggatatccttttgatttaacctctgctttaataaaacggaggatatcaagttgcctttttgatagcttcgtcatttttcgcacctcaaaacgtcgattttaagaagattatagcatgattttccttacagtacaaacataggttcgaaaaaacaattgacagaaacgtttgttcgtatatactgaaattataaaaatgcgaacaaacattcctgttggaggttatgatcatgagtaaagaatctattatttttgtcggtctgtttacagtgattttgagcgcggttatccttatgctgtcatatacaagcagcggccaagagcttaatcagtatgttaaaatagaagtccagcaaggcgacacactctggtcaattgctgatcaggtagccgatacaaaaaagataaacaaaaatgattttattgaatgggtagctgataaaaatcaacttcaaacctctgatatccagccgggtgatgagttagtgatcccattgaaaaagaagcatcaggatgcatatgaattagcaactgtaagatagagaggaaagagagataaaatgaaagcactcatttatgcccgtgtaagcacaaataaagaacagcaggaaacgtcattaaagcggcaggaggaggagcttacggccattgcagcggagaacggcatggaagtggtcaaagtgatttcagaaaaagccagcggatatgaaatggatcgggatggtgtatttgagctgctcgatgagattaagaacgctgatattgatgtcattttggttcaggatgagacaaggctcggacggggaaacgcaaaaatcgcactgcttcattgtatttatagagaaggtgtgaaagtctatacaacggctcatagaggtgaactggagttatcggaggctgactcaatggtcttggaaatcgtcagcattgtggaagagtatcagcgaaagattcacaacatgaaaatcagacggggaatgaaacgtgcagtaaaaaacggttttaaaccgcaaaaaaacttaaaaaaccaacatgggaacagtggaaaagaaaaaatagaggtgccaatctcagagatcgtccgcctgagagcgaataaactgacgtttgctgaaatcgcggctaccctaagagggtttggctatgatgtctctaaagcaaccgttcaccggcgttttcaggaatacatagagaatgaagagactgcagagtgaatcagttgtaaaactttttttgatctagtactatatagacaaaatgcaataaaggagtttaacatgatttcaaacgcgaaaattgccagaattaatgaacttgctgccaaagctaaagctggcgttattacagaagaagaaaaagccgaacagcaaaagctccgtcaagagtacttgaaaggttttcgttcttctatgaagaacacgttaaaaagtgtgaaaatcattgacccagaaggcaatgatgttacaccagaaaagctaaaaagagaacaaagaaataacaaacttcactaatataagaggaatacggcaatatcgtattcctcttttgcatatactataatcaaaactcttatgtgacaaaattcaacaagtttctctcaaatttaagctgaaacagttgagaaaaagtcgtcagacatttatgatgtaagggtacaacacataaggaaggggatttttatggatacaattgaaaagaaatcagttgctaccattcgcacactgtcaatagacgctattgaaaaagcaaattctggtcacccagggatgccgatgggagccgctccaatggcatacacgctgtggacaaaatttatgaacgtaagtccggcaaaccctggctggtttaaccgtgaccgttttgttttatctgctggacacgggtcagcactattatacagcatgcttcatttaagcgggtttgatcttagtattgaagatcttaagggattccgccagtggggcagcaaaacaccaggacatccggaattcggacatactgccggtgttgatgctacaacaggtccgcttggccaaggaattgccatggcagtcggtatggcaattgctgaacgccatttagcggaaacatacaaccgcgattcatttaacgtagtcgatcattatacatacagtatttgcggtgatggtgatttaatggaaggtatttcttctgaagccgcttcactcgcaggccatcttcagcttggccgtctgatcgtactatacgattctaatgacatctctcttgatggagacctcgaccgttcattctctgaaaacgtgaaacagcgttttgaagcaatgaattgggaagttctttatgttgaggatggaaacaatattgaagaattaacagcggctatcgaaaaagcacgccaaaatgaaaagaaacctacattaattgaagtgaaaacgacaatcggattcggttcacctaaccgtgccggtacatccggtgttcacggtgcgccgcttggtaaagaagaaagcaaattaacaaaagaagcttacgcgtggacatatgaagaagacttctacgttccgtcagaagtttatgagcatttcgctgtagctgttaaagaatcaggtgagaaaaaagaacaagaatggaatgctcaattcgctaaatataaagaagtttatcctgaacttgctgaacagcttgaactggcaatcaaaggagagcttccgaaggactgggatcaagaggttcctgtgtatgaaaaaggaagcagtttggcatcccgtgcatcttccggtgaagttctcaacggacttgcgaaaaaaattcctttctttgtcggaggttctgctgacctagcgggatcgaacaaaacgactattaaaaatgccggtgattttacagcggttgattactcaggcaaaaacttctggtttggtgtacgtgaatttgcgatgggtgcggccttaaacggtatggcgcttcatggcggtcttcgtgtattcggcggaactttctttgtcttctctgattacctgcgtcctgcgattcgccttgcagcgttaatgggccttcctgtgacatatgtcttcacacatgacagtattgcggttggtgaagacggtccgacgcacgagcctgttgaacagcttgcttcactccgtgcgatgcctaacctttctttgatccgtccagcagacggcaatgagacagcagcagcatggaagcttgcagtgcaaagcactgaccacccaacagcgctagtgcttacacgtcaaaaccttcctaccatcgatcaaacatctgaagaagcattggcaggagtagaaaaaggtgcatatgtcgtttctaaatctaaaaacgaaacacctgacgctcttctcatcgcttccggatcagaggtaggtcttgcaattgaagcgcaggctgaattggcaaaagaaaatatcgatgtttctgttgtcagcatgccttcaatggaccgttttgagaaacaatctgatgaatacaaaaacgaagtccttcctgcagatgtgaaaaaacgtcttgcaattgaaatgggctcatcatttggatggggcaaatacacggggcttgaaggtgacgttctcggcatagaccgattcggtgcatctgctcctggtgaaaccatcattaacgaatacggcttctcagttccgaacgtagtgaatcgagttaaggcattaatcaataagtaagcttttgaaagaggatgagtcaaatcatcctctttttcttgtttatccgacaaaaatagtattggctgtttaacagtaatagacaattctttcttttcttcttttgtataatagagagcaaatgaaatgctgctggaaaaggggatgaaaagatggaacgtcactactatacgtacctgatcaaagaggaatttgccaatcactatttcggccgggaatcggttatgtttgagctgtttcaagactatcattggacaagccttgaaaagcagcagtatgaaatgacagagaaacagattcaatatattacacaaccaatcccgattttacatatgcatcagcggttaaaaatgaatttaaacaagacggattacaggcagctggattatatttatagaatagctttgccgaaagcaaaaggccacgcgacgtttatgatgaaggagcacatgatagaaattgtggcttcgggagattacgaggcagaaacgatattctttgaagtgttaagaaaagtaagcccttgctttttagcaatggatttcaattcgaagcgttacggatggctaaatccggtgaaagaaagaaattttgtctaaaaccgaagaaaaagagatgtaaatgttgtataatagcttttggtttagtacactttaaactagacaacatgaaggaggaaataaaatgactttatgggttggcatcctagtgggcgttgttgcattgctcataggtgttgcactcgggttttttattgctcgtaaatatatgatgagctacctgaaaaagaatccgcctattaatgaacaaatgttacgcatgatgatgatgcaaatgggaatgaaaccttctcaaaagaaaatcaatcaaatgatgaaagccatgaataatcaaacgaaataatacgtaaagattatgatatagagaaacatggttataaaataaaaaacccttatacgggttttttattttgcaatcattcatcacccgctactgctcgaaggcgctgcttttgatattgtatgagaagatggtcaagctcctgactgagctctatcgtaatatgagatgtcattccgttcgccatgacaatttgcagcagctctgctctttttttttcaatttcttttaatagatgctctctaatcacagggatgtatcctttcatacattagatcttcaaagtgaatgtttatattatatccatatttatactaattttcaaatgagaaggagtataatgtctcaatgtcaaattaaattatataagttttttctgaaaatagaaatccttcaagtgaaagtgttaaaaaaatgaaatgattttgtcataacttgaaggaatgtcaaatcatgaagggatgatgacatgggagacgtgaattattttttgacattcggagcggggtttttatcctttatttcgccttgctgcctgccgctttacccagcttttttgtcatatattacaggggtcagcatggacgatgtaaaaactgaaaagctgctgctgcagaaaagaagcttgtttcatactttgtgttttttgcttggcttttcagtcatttttattgctttaggctatggaacatcttttattggcagcctgtttagggattatcacgatgcgattcggcaaattggcgcgttgcttattattttgttcggtttcattacactcggtgtgttccggcctgaggctatgatgaaagagcggagaatccattttaagcataaaccaagcgggtttttagggtcggtcttaatcggaatggcatttgcagctggatggacaccatgtaccggtccgatattagctgctgttatcacacttgcaggcaccaatccgggctcagcggtgccatacatgatgttatatgtactcggttttgcggtaccgtttcttttattgtctttttttatcacaaagctgaagtggataaggaagaaccagcttttcattatgaaagctggtggcgttttgatgattgtgattggtgtgctgttattctttaattggatgagcctgatcattattttgctgtcagatctttttggaggctttactggtttttgacggtaaattactttcgtactactactaatccttttgtttttggtacaataagactattatctgtggaaatcgattgttggaggggaatatgacaagagttttagttgtagacgacgccaagttcatgagagtgaaaatcagagagatcttggaagaggcaaattacataatcgcaggcgaagcggcggacggtgaacaagcagctgacctgtataaaaaactgcgcccggaccttgtgacaatggatattacaatgccggtgaaaaacggcataaaagcgcttcgtgatatcttaacctttgatcctaaagcgaaggtcatcatgtgcaccgccatgcgccagcaaagaattgtaacggaagcaattgagctgggggcaaaggattttattgttaagccgtttgaggaaacaaaagtgctggaagctgtaagccgcgttatgggacattaaagtcatttcttttcaaaatggttttttttattgttttggagtatagtatatagtatcaacactccgagaaacaaaggaatgataagtatgatgattatagtttcatcaattattgctgtgttaatggctgtagctgtgatggtggtcagaataaagtcctctgacaagcctgtttcaccaaaaaaaatcattcttccgccgatttttatgagtacgggagcgttaatgtttttatttccggtattttgggtaactggagcagagtttttggaagcattcactttaggtgtgattttctctatttttctaatcaaaacttctaagttcgaaattaaaaataatgaaatttacatgaaacgctctaaagcatttgtttttatattagtcggtcttttggtgatcagaatcgtgatgaaatcgatcttgagcacatcaattgattatggtgcactgagcggaatgttttggattctggctttcggtatgattgtgccttggagaatcgccatgtatttatcatatcgaaaacttcataacgagctgcagtcatctaatattcaaatgaattaaaaaacctttcctcttgtcaggaaaggttttttatttgagaagggtctgataaggttccaaatcgatttttttgtcccgcagatgcctttttaagaaggtatggtctcttttaggagttgcgagaatatagcctttgatcataagttgctgatcaatctttgctaccttttcttttaatgcaagctcaccgattttgcctgcgattttagcttttgctgcatctctgaacagctctggcacgggcgcagtcaattcatctagaaactgtttgttttcatcgttccataaatgtctgctgttttcaatatagtaatcctgccaatcaagctctgatctgccgtcctcttttggtaaacgctttaaaaactttcgaaacatgaaaaaaccgccgattgataataagactaccatcatgattacccaaaacagaataaaccataaaaaccatccttccagcatcaatcattcccccttattctaaccatattgtatacgaagagagattagaagaacacagtaaaaaaagaatagaaaaaagtgatagacgtctagtcaaaagagatagtagatcatattctattgtatagtgaatctgctatttggccatgggagagtcactagagggtatttgacgataaatggacggaaaaaaagtcactttcataataggggatgaaagtgactttttatgtttagctgagaggaaattgaagagaaaaagaagagccatcttctgtttctttattgacggcgactgtgagtatttgattttcgcattcgacttgaatgtttttgtcattaaaataaaaaggaagcatcatttgtttttcaaaagtctgtcctgacgatttgacagttaagatgaactcgcatccagaaagggtaactgttacttgtgtaggctgtaaaaaagtcagatccgcttctataatatactgctgacttgtttcatataaatcaataggcaatgtttcgtcgtaccaggcgaaggggtcttcaaaaaattgccgaagccattcatccatactatcgaaatcattcgcatcgttgcgttttgaatggttcatggaagcattcctccacatatcaaccttgctttacatcatatgcggtggattataaatgggtgaacgcataaaaaaacagacactaaggtctgcttttcttacatatcatggcttgagttgtgcttttgtcttgtatggtttcggttttttacttttttgcttccgcttagaggctcgggttggccgggattgtgtcctttaggggcgtttttatgcatatctttacttgtattcttattggtcataaaatgagaacctccttaaaagagttcggtgttattgattggtttttctttttttgttattttggcgttctgcttcagtcagtacaagctggtcgttttcaatatagccggcgcctttgccttggctttttgcgtcattcattccgttaatgacgtgattcgcttttcttttgaccatcattatcacctcaatcataatatggcttcttttattgtgttatatgagagagcgtaaacagtaaaaattaccggtacatttttctcataagtcgaacttattgtatttaataaaaacattgatatttacttatgtatgattttgttttaatatgaaattgtgagaaaattgtgatggaatgtaatgttcatctgagaatgatctgatctgaagggggattttggagaatggcaaacgagcaaaaaactgcagcaaaagacgttttccaagcgagaaaaacgtttactacaaatgggaaaacatatcattactactctttaaaagcgttagaagattcaggtataggaaaggtttcgaagcttccttattccatcaaagttcttttagaatcagtattgcgtcaagttgacggcttcgttatcaaaaaagaacacgtggaaaatttggcaaaatggggaactgccgaattaaaggatatcgacgttccgttcaaaccgtctcgtgttattttacaagacttcacaggggttccggcagtagtagatctggcttcactgcgtaaagcaatggcagctgtcggcggagatcctgataaaatcaaccctgaaattcctgttgatctcgttatcgatcactctgtacaggtagataaagcgggtacagaagatgcattagcagtaaatatggacttggaattcgaaagaaatgcagagcgctacaaatttttaagctgggcaaagaaagcgtttaacaattatcaggcagtaccgcctgcaacaggtattgtgcaccaggtcaaccttgagttcttggcaagtgttgtccatgccattgaagaagacggcgagcttgtaacgtatcctgatacgcttgtcggaacagactcacacacaacaatgattaacggtatcggtgttctcggctggggtgtcggtggaattgaagctgaagcgggaatgcttggacagccttcttacttcccagttccagaggtaatcggcgcgaaacttgtcggcaagcttccaaacggaacaacagctactgacttggcgttaaaagtaacacaagtgctgcgtgaaaaaggcgttgtcggtaaatttgttgaattcttcggaccgggaattgctgaactgccgcttgcagatcgcgcaacaattgcgaatatggctccggaatacggtgctacatgcggattcttcccagtagatgaagaagcgcttaactacctgcgcctgactggccgtgatcctgaacatattgatgttgttgaagcatactgcagaagcaatggcttgttctacactccagatgcggaagaccctcaatttactgatgtggttgaaattgacctgtctcaaattgaagcaaacttatcgggtccaaagcgtcctcaggatttgatcccgctatctgctatgcaggaaacgtttaaaaagcaattagtcagccctgcaggtaaccaaggattcggtttaaatgctgaggaagaaaataaagaaattaagtttaaactccttaacggcgaagaaacagttatgaaaacgggtgcgatcgccattgctgcgattacaagctgtacaaatacatcaaacccatacgtgctgatcggcgccggactggtagcgaaaaaagcggttgagttagggcttaaggtgcctaattacgtgaaaacgtcacttgcaccgggttctaaagttgttacaggatatcttgtgaattcaggccttcttccatacatgaaagagcttggctttaacctcgttgggtacggctgtacaacatgtatcgggaactcaggtccgctttcaccggaaatcgaagaagcggttgcgaaaaatgatcttctgattacgtctgtcctttccggaaaccgtaactttgaaggacgtattcacccgcttgttaaaggcaactatcttgcttcaccgccgcttgttgtggcatatgcgctggctggaacggtaaacattaacttaaaaaccgatccaatcggtgtgggcaaggatggtcaaaacgtatactttaatgatatttggccgtcaatggacgaaatcaatgcacttgttaagcaaactgttacgccagagctattccgcaaagagtatgaaacagtatttgatgacaacaagcgctggaacgaaattgaaacaacagatgaagctttatataaatgggataacgattcaacttacatccaaaacccaccattctttgaagagatgtctgttgagccaggcaaggttgagccattaaaaggactgcgtgttgtcggtaaattcggcgattcagtcacaactgaccatatttctcctgcgggggcaatcggaaaagatacgcctgccggaaagtatttgcaagaaaaaggtgtttcacctcgtgactttaactcctacggctcccgccgtggaaaccatgaagtcatgatgagaggaacatttgccaacattcgcatcaaaaaccaaatcgcaccgggtacagaaggcggatttacgacgtactggccgactggtgaagtaacatccatctatgatgcatgcatgaaatacaaagaagataaaaccggtcttgtcgtattagcaggaaaagactatggtatgggatcttcacgtgactgggctgcaaaaggaacaaaccttctcggcatcagaacggtcattgcagagagcttcgaaagaattcacagaagcaatcttgtattcatgggtgtgctgccgcttcagtttaaacaaggtgaaaatgcggatacactcggcttaacgggtaaagaagtcatcgaggtagatgttgatgaaacagttcgtcctcgtgaccttgtgactgtaagagcaatcaatgaagacggcaatgtaacaacttttgaagcagtcgtccgctttgatagtgaagttgaaattgattactaccgccatggcggcatccttcaaatggtgcttcgtgaaaaaatgaagcagtcctgatgaatcaataggaagagaaggcatttcgctttctcttctttttatgacacaatgtgctgcggaggtggcatatgctgaaaaaatggctcgcagggatcctgcttatcatgctagtcggttatacgggatggaatttatatcaaacatacagcaaaaaagaagtcggaattcaagaggggcaacaagcacctgatttttctttgaaaacgctatcaggagagaaaagctctttacaggatgcaaaaggcaaaaaagtgctgctcaatttttgggcaacttggtgtaagccgtgccgtcaggaaatgcctgcgatggaaaagctgcaaaaagagtacgccgacaaacttgcggttgttgcggtaaatttcacttcagctgagaaaagtgagaaacaggtccgagcgtttgctgatacttatgacttaacgttccccattctgattgataaaaaagggatcaatgctgactataacgtgatgtcatatccaacgacatatatcttagatgaaaaaggtgttatccaagacatacatgttggcaccatgacaaaaaaagaaatggaacaaaaactggatcttgattagattcagttttttttatactcaaatatgcttacaagttttcagaattggaaaaaataaaagaatatgcggaggtgagaagcgtgaagaagatgagaaaacgttcttttcatgagctcgtcatggaaaacaaaaaagagctgatgaccaatacagagtatttaaatcagcttgaggaaaagcttgaacagcgatttaagcaaaaataacctttaatttgtattcatgtttacccctccttttgagaaacctatctgttgaggagggataaacatgggaaacaacaagaaaaacggtcagcctcaatatgctccaagccacttgggtacaaagcctgtaaaatataaagccaataaaggggaaaaaatgcatgatacttcaggacagcggccgattatcatgcagacaaaaggcgagtagcgaaaattcgagtttatttctaggaggtacatccgaatgacaaagaaccaaaatcaatatcagcagcctaatcctgatgatcgttctgacaatgtggaaaaattgcaggatatggttcaaaatacaattgaaaatatagaagaagcagaagcatcaatggagtttgcttcaggagaagataaacagcgtatcaaagaaaaaaatgcaaggcgcgaacagagcattgaagcgtttcgtaatgaaatacaggacgaatctgcagcgagacaaaacggataccgttcttaaaaaaccagggaaacctggtttttttctttctgatttgattatggtaaaatggggctaaattgacgttaagggagcagagtaatcttgcatgtatcaaaaaaagaaatagaagtgcgttatgcagaaacagatcaaatggggattgtctatcacgcaaattatcttgtgtggatggaggtcggcagaacggccttgattaaggacttaggctttttatatagtgatatggaaaaaaaaggcgttctgtccccagtcgttgatatcaatatttcctataaaaagccgcttcattacggagaaaccgcggttgtacatacatggatagaggactataacggatttaaaaccgtctatggttaccacatttataatccggccggtgagctttccatcaaagccacctcatctcatatttgtgtggataaagaaagctttaagccaattcaattccgcaaagcttttcctgattggcacacagcatatgaaaaggccaaaaaatagggaagtgaacgggatatggcgtttggtgtgaaacgggaggaacttaaccggtggaaacaagcagtgaaaagaggagaaatcgcatttttaacacattactggctggatgaccgatttccagaagcaaagaccgtgacaaaagccggctgtgcagacattgataagctggttcagtggggagcggcgtacgggttaaaaaaagaatggatccataagaaaagtgaatttccccactttgatctgctgggggaaacacaaaaatatattttggaacaagaaaacctaaccgatcatcttatacgatttcatttgtaaaaaaagaacgcacatgaagtgcgttcttttttattggtattcaaaaaccggttcatcagcgtcttctgaatagctgacgagaaggtcgtggttatcaaagtaccataaatcactttcttcaataaagaaggtaatgccatcagcttctgcagtgactccagcctcttgtggggcatctttcgctacaccgagagaaaaacccttttgaacgttgctgcagcctccatagcggacgaaaaagcgaacctggtctccgctttccaaatcgagttcttctttataccagttcaatgcgtcttcgttaattgtcatattcataacagaacacccctttgttcttcatttgaattttctctattataaacgtattaggctattctgtgtcaaaagagaagttttttaagcttataaccattttactttaggttctgttttattgataattcgtttaatgttcgctcggtgtctgtatatcacaaaaatagtgagcagggtaacgacaatcaataaatacgtatcatggacaaagaaactatatataacagtatagatccctgttaacatcgatgagagagaaacaaatttagtcaagtataaaaagatgaagaataccgcaaccatcgtgataaataacaggggtgcgtaaaatagcaaaacgcctcctgatgtcgccacggctttaccgcctttaaatttggcgaagatgggaaacacgtggcctaaaaccgcaaagactcctgcaagaagcgggtgaatatcaacatgcatgagaaaaggcaatgcagttgccagtgtccctttcaaaatatctccggctatgacgaccgaaccagcttttacacccaatgtacggaatgcattggtagcgcctaagttgccgcttccgtgctcccgaatatcaattcctttggcaagcttgcccacaattaagccagatggaatgctgcctatcaagtaggccaaaataatcaataaagcaattaacatctacatttctcctttttcaaattcccttctttttattttaacatgagatgtcatgatctgatgataagtttttttgtaaagtttgcttacaaatcaaatcaaacatgcatcatattttgatttctcctgttttgatcgtgtaaaataagtgaaaaaggagtgacacacgatgcaaaacccttctaaagcggaaattaaagagattcttcaaagaagcaaacgtatagcggtagtagggctttcagaccgtccggatagaacgtcacatatggtttcaaaagcaatgcaggacgcgggttatgaaattatccctgtgaaccctacaattgatgaggcgctaggtgtcaaagccgtttcatctttaaaagagatagacggtccgattgacatcgtaaatgtattccggcgctcagaacagcttcctggagtggcggaagagtttttagagacagatgcgccagtattttgggcacagcaagggctagttaatgaggaagcataccagatgctaaaagaaaaaggcagaacggttatcatggatctgtgcataaaagtggcacacgctgtaacaaaataggtgcagaactgcaaaaatccttgtaaattcaaggatttttgctttttaattttaagatattgtttgcgtattacggtgaaacagatacaataaagcttgaacagctttttttgaataccttgtccagctgggtttcggccgttcgatttgcgaaggtctgctgctttatatataataaacaaacatacgttctcatagtgtaaaaacagcactagccgatgttttgagaagaactgattcgttagctctatgttgcgattgcaaacatattggttataatgaggagtccaaggcagtactggctcgaggcgaggtttataaaaaatatcttatatacaaatgatgtgtaacactgaaaagagaaagacaatgttagtttttgaaaggggtttgtacgtttggctagaaaacagcaatttgattacaacgaagatgccatacaggtgctcgaaggccttgaggctgtcaggaaaaggccgggtatgtatattggctctactgacgcgcggggtttgcaccacttggtttatgaaattgtagataactctgtcgacgaggtgcttgccggccatggagatcacataatcgtcaaaatacataaagacaatagtatttctgtacaggatagaggccgcggcatgccgaccggaatgcataagctcggcaaaccaacccctgaagtgattttaacggtgcttcatgccggagggaaattcggccaaggcggctataagacaagcggcgggctccacggagttggtgcatcagtcgtgaatgctttatctgaatggctgacggttaccattgagcgggacggttttgtctatcagcagcgatttgaaaatggaggaaaaccggttacatctctcgaaaagatcggcaaaacaaaaaagacgggaactcttacacactttaagccagatccaacgatgttcagcacaaccacttataattttgaaacgctctctgagcgcttaagagagtctgcgtttttgttaaaaggactgaaaattgagctgattgatgaacgcaatgaccagcgtgaggtcttttattatgaaaacggcatagaagcgtttgttgcttacttaaatgaagaaaaagacgtcttgtctgaagtggtctcgtttgagggtgagcatcattctatagaagtggactttgcgttccagtttaacgatggttattctgaaaatattttgtcgtttgtcaacaatgtcagaacaaaagacggcgggacgcatgagtcaggtgcaaaaactgcgatgacgcgtgcttttaatgaatatgcgcgaaaagtggctttgctgaaagaaaaggataagaaccttgaaggcaccgatataagggaagggctttcagccattatttctgtccgcattcctgaggagcttcttcaatttgagggacaaacaaaaggaaagctcggtaccagtgaagcaagatcagcggtggatgcgattgtttcagagcagcttgcttactttttagaggaaaatcgggacaccgcaacgcttcttgtcaaaaaagcaatcaaggcgagccaggcgcgcgaagcggcacgcaaagcccgtgaagaagcaagaagcggcaaaaaacgaaaaaaatcagaagcgactttaagcggaaagctgacgcctgcgggttcaagaaacccggcaaaaaatgaattgtatctcgttgagggagattcagcaggcgggtcagccaagcagggacgagaccgcagattccaggcggttctgcctttacgcggtaaagtcattaatacagaaaaagctaagcttgctgatatctttaaaaatgaagagatcaatacgatcattcatgcgatcggcgggggagtcggggcagatttctcaatcgatgacatcaactacgacaaaatcatcattatgaccgatgccgatactgacggcgcccatattcaagtgctgcttcttacctttttctatcgctatatgaaaccgctcattgagcatggcaaggtgttcattgcgctgccacctttatataaggtcagtaaaggaagcgggaaaaaggaaatcattgaatatgcatggtctgatgaagagatgggggatgtcctgaaaaaagtcggcaaaggctataccattcaacgatataagggtcttggagagatgaacgcagaccagctgtgggaaacgacgatgaatccggagtcccgcacacttgttagggtcaaaattgacgatgcggcacgtgtagagagacgtgtgacgacgttaatgggagacaaagtagagccgcgcagaaagtggattgagaaaaacgtcgctttcggcttagatgaagaaagcaatattttagaaaatgaaaacttatcggtcgctgaggaggtttaatgattgtcacagccagaattatttcatgatttaccattagaagaggtgatcggcgaccgttttggacgctacagtaaatatattattcaagacagggcgctgcccgatgcgagagacggattaaagccggtacagcgcagaattctgtatgcaatgcatacagatggaaacacgtttgataaaaacttcagaaaagcggccaaaacggtcggtaacgtcatcggtaactatcatccgcacggtgacagctcggtttatgaagcaatggtgcggatgagccaggattggaaagttcgtaatgtgttaatcgaaatgcatggaaacaatggaagcatcgacggagatcccccggcagccatgcgttatacagaggcacgattatctccgatagcatctgagcttcttcgggatattgacaaaaacacggttgaatttgtgccgaacttcgatgatacaagcaaggagcctgtcgtactcccggcgatgtttcctaacctattggtcaacggatctaccgggatttcagcaggatacgcgaccgacattccccctcatcatctgggagaagtcattgatgctgtcattaagcgtattcaaatgccttcttgctctgttgacgaactcatggaagttattaaagggcctgattttccgacaggcggtattattcagggcgttgacgggataagaaaagcttacgaaaccggaaaaggaaaaatcattatccgcggaaaggctgaaattgaaacaatcagaggcggacgagaacaaattgtcattactgaaattccatttgaagtaaataaagcaaaccttgtaaaaaaaatggacgagttccgtattgataaaaaggttgaaggcatctcagaggttcgtgatgaaacggatcgaacagggctgagagtggtcattgaactgaaaaaagaagctgatgccaaaggcattttgaatttcttatataaaaatactgatttgcagatcacatataacttcaatatggtggctatccataaccgccgtccgatgctgatgagcctgccgtctattttggatgcatatatcggacaccaaaaggaagttgtcacaaaccggtccgtttacgagcttcaaaaagcaaaagacagacatcatatcgtagaagggctcatgaaagctttgtctattttggatgaagtgattgcaacaatccgttcttctagcgataaacgtgacgctaaaaacaatttgatcgcgaaatatgaatttacagagcctcaggctgaagccatcgtgtcattgcagctatatcgtttaaccaataccgatatcacagcgcttaaggaagaggcagaagagctcggtaaaaaaattgaagagctcgaatctattctgagcaatgataaaaaactgctaaaagtgattacaaacagcttaaaagcactgaaaaagaaatatgcagatacgagacgctccgtgattgaagaaaaaattgaagaaattaaaatcaatctcgaagtcatggttgcatctgaggatgtatatgtaaccgttacgaaggatggttacctaaaacggacgagccagcgctcatttgccgcttccaacggtcaggacttcggaatgaaagatacggacaggatgctgcatcagtttgaaatgaatacgacagacgtgctgctgctctttacgaacaaaggaagctacatctattgtcctgttcaccagctgcctgatatcagatggaaggacatgggccagcatttttcaaatctaatcactattgaccgtgatgaaacgattgtaaaggctataccgataaaagaatttgatccgtcggcatatcttctattctttacgaaaaacggtatggtgaaaaagacagagctcactcattataaagcacagcgttattctaaggcacttgtagccttaaatctgaagggtgaagatgaactgattgatgtacatgtaacaaatggggaaagccagatctttatggccactcacttagggtatggtctatggtttggagaagacgaagtgaatgtagttggcgcgcgtgcggcaggtgtcaaagggattaacttaaaagaggatgactttgttgtctccggtgagattcttcagcaatctgattcaattgtcttgttcacacagcggggagcggttaaacgcatgagtctttctgagttcgagaagacatcccgtgcaaaacgcggtgtcgtaatgctaagggaactgaaaaagaatcctcaccgtgttgtagcactgttcgcttgcggtcttgaacagcgactaatggcagaaacagaaaaaggcgacagaaaagaactgcagacaaaagagttgcggacaaacgacagatacagcaatggctctttcttttttgatgaagaggaatcaggcaaggttacagctgtttggcgccttcatacagaacaataataaaaaacccgctcatactatatgagcgggtttcgtttgttttttatcagctttcatggttggtgaatagatctgttacagcatgaatgacttcaatcccctgccatacaaataaattcagcgctgtgaaagaaaataagcctaaaatcaccattcttaagataaacaacatgtttaacagcctcctcatattttcgttacataatcgggtgatgttgaacatgaagtttgccgaaataagacgattgataaaatttggccagtataaagctttttttccgctgacgtctgcgggagtatcccgtacttttgctttcagcggtcagcagcagaacagccattgcccataaagcggtcagcgtaaatgcccctgtgatggatttcttctcatcatcagcattttggccggctttcatctcatgcatttcctgctggtcggctacggctttataatgatggccgatatcaaaggcgtggggaattgagaacaaatgaaaactggcaatcgccaagaataagatggatgctttcaatatcgttacttttttcaaatgatctccccctcctttaatattactgaatatttttataataataccccaatccatcctaaaagtaaacctgatttattaaatttaaaaataaatttaactttgttaagtatatatctttttgcttatttttgaaagagaaaacttcttttattagcgtatgtatacccggtttatggtgtgaataaaaacatattttaaatgatatgttgtttaggatttattactttatttatgtgtaaatcaaagagaaaggcaagagaatgggaagaaatgattacattgttaatagggtactctttttttaaagccagtttgcaaggaatgtttttattcgtaggaaaataatagagaaggggtcgacagagtaacatctggctatgacaatattcttctcgaaaaaacttcctaattcgtcatattgtgatataataaaactcgttatgttaaaaaatctaacatcaaaatcgaattcgtattgaattgatgaaaacgggaggtaaatatggagtcttttttcaatagtttgattaatattccaagtgatttcatctggaaatacctattttatattttaatagggcttggattattttttaccatacgttttggttttatccaattccgttattttattgaaatgttcagaatagtaggggagaagccggaaggaaataaaggtgtttcatctatgcaggcattctttatttcggccgcatcccgagtcggcacagggaatttgactggtgtagccttagcaattgcgacaggcggaccaggcgctgtattttggatgtgggtagtggctgcagtaggcatggcttcaagctttgtcgaaagtacattagcacagctttataaggtaagagacggggaggatttccgcggagggccggcctactatattcaaaagggtcttggtgccagatggcttggcatcgtttttgcaatcttaattaccgtctcattcggcttgatttttaacgctgttcaaacaaatacaattgctggagcattggatggcgcattccatgtaaataaaatagttgtagccatagttctggcggttttaactgcgtttatcattttcggcggtttaaaacgtgttgtcgctgtttcacagctaattgtgccggttatggcaggcatttatattcttatcgctttatttgttgtcatcacgaatattacggctttccctggcgttatcgctacaattgttaaaaatgctttaggttttgaacaagtcgtcggcggcggaataggcggcatcatcgttatcggtgcgcaacgcggacttttttcaaacgaagcaggaatggggagcgcaccaaacgcggctgcgacggctcatgtatcccatccggcaaagcaaggctttattcaaacattaggcgtatttttcgatacatttatcatatgtacgtccacagcatttattattttgctgtacagtgtaacgccaaaaggcgacggcatccaagtcacacaggctgctcttaaccatcacattggaggctgggcgccgactttcatcgcagtcgcaatgttcttgtttgcattcagttcagttgtcggcaactattattatggcgagacaaacattgaatttattaaaacaagcaaaacatggctgaacatttaccgtatcgctgttattgctatggttgtgtatggatctttatcaggcttccaaatcgtttgggatatggcggacctctttatgggtatcatggcgctgatcaacttaattgtgattgcgctgctgtcaaacgttgcttacaaagtgtataaagattacgcgaaacagcgtaagcaaggacttgatcctgtgtttaaagcgaaaaacatcccagggctgaaaaacgctgaaacatgggaagatgagaaacaagaagcataatataaatataaaacaaagctgcattcaatagttgaatgcagctttttcattattggaaataaatttaatttttcgactcgaatgaaaaatgacgtgtaaagtcccaattcagtccagttttctttgttctatatgtgtcatgtgtgtcttattcattggaggtagagcaaattgacaggcttttaaacctccccaaaacaagaaattaggttgatagacaatcatgagaaagatttttacaatgagttcgtgctcataagaagtgtagagccaaaatgatgcgaaggaggaaaagatcagatatgaaacggtcaatctctatttttattacgtgtttattgattacgttattgacaatgggcggcatgatagcttcgccggcatcagcagcagggacaaaaacgccagtagccaagaatggccagcttagcataaaaggtacacagctcgttaaccgagacggtaaagcggtacagctgaaggggatcagttcacacggattgcaatggtatggagaatatgtcaataaagacagcttaaaatggctgagagatgattggggtatcaccgttttccgtgcagcgatgtatacggcagatggcggttatattgacaacccgtccgtgaaaaataaagtaaaagaagcggttgaagcggcaaaagagcttgggatatatgtcatcattgactggcatatcttaaatgacggtaatccaaaccaaaataaagagaaggcaaaagaattcttcaaggaaatgtcaagcctttacggaaacacgccaaacgtcatttatgaaattgcaaacgaaccaaacggtgatgtgaactggaagcgtgatattaaaccatatgcggaagaagtgatttcagttatccgcaaaaatgatccagacaacatcatcattgtcggaaccggtacatggagccaggatgtgaatgatgctgccgatgaccagctaaaagatgcaaacgttatgtacgcacttcatttttatgccggcacacacggccaatttttacgggataaagcaaactatgcactcagcaaaggagcacctatttttgtgacagagtggggaacaagcgacgcgtctggcaatggcggtgtattccttgatcaatcgagggaatggctgaaatatctcgacagcaagaccattagctgggtgaactggaatctttctgataagcaggaatcatcctcagctttaaagccgggggcatctaaaacaggcggctggcggttgtcagatttatctgcttcaggaacattcgttagagaaaacattctcggcaccaaagattcgacgaaggacattcctgaaacgccatcaaaagataaacccacacaggaaaatggtatttctgtacagtacagagcaggggatgggagtatgaacagcaaccaaatccgtccgcagcttcaaataaaaaataacggcaataccacggttgatttaaaagatgtcactgcccgttactggtataaagcgaaaaacaaaggccaaaactttgactgtgactacgcgcagattggatgcggcaatgtgacacacaagtttgtgacgttgcataaaccaaagcaaggtgcagatacctatctggaacttggatttaaaaacggaacgttggcaccgggagcaagcacagggaatattcagctccgtcttcacaatgatgactggagcaattatgcacaaagcggcgattattcctttttcaaatcaaatacgtttaaaacaacgaaaaaaatcacattatatgatcaaggaaaactgatttggggaacagaaccaaattagttaagcttttttttggcggacatcagtaacgatgtccgtttttatcatctaataggaggtttgcgttgtggatgaaatactgaaacagtatatggtgctgtataaaaaaatgagtaatatgataaatggtcccgactatccaggtaaggaaaaagacatccagcatcaaaaagatcagatcgaagtttacgaaaaacagctgcagcaaggattttctacagattatgactatgatgtgtttgctgattctgttatcaaatgcgcatatggcgatatgacgctggaagatttagaagccgtttattatggattgacaacaccatttttttgatttgtcattcagcagtaaaatttcaatttctgtctcactaacttaagtatactttgatattgagacagaaatttatttattttgtttacttcctagaatatatattatgtaaactagaaaagatgaagaataaagctttgctgtttttatgtacatcctttcttcttcctgtaattcagcaacaaaataaaaaagcgatttcccaatcggaaaatcgccaattcagacactctattatttatgtgtgtctttgtgctcttaacgatttacaacaaatgttgtcacgctttgagctggaagatgagcccaaaaatgattgcctgatacagtgagattcgttccaggttgtagattgctgctgctgctcgtgatccatctagatacgtttgaagcagatccattctgcaaaacaaagttttggttgactcctgtgttgcttttattgatggcaacaataacgaccttgttgtcacctttataggctgacacgtaaacgttcgcattagggtttttcgttgcatcaatccttacatagccgggacgcacaaactttgagaaatgagccatattgtagccgcgtttgctgatcgtaccatcttctttcataggtccatatgatcttcggatgtaccaccatacataagcttgaaagtccccctctaccatcgcattgtgaatatgctgtgaaacatccaatgcctcaggccatcgatccgccgagttggtatcactgtttggatagtatacttccgtcatccaaaggtccttccccgctcctttttgtttgaaaagaggataagggaattggctgacctgggtgccgtacaggtgagttccgagaatatccatattggcaagagcctgcggatcgttcaagatcgggtccgacaaattcttcaagtattgaaatgactcaggcgcaatgacgcgggcattgatcgagccggcgttttctctcataaagcgaagtatttcttgcggcgtccaccacgtccactcgtgagcgtaatcaggctcgttttggaccgaaatcgcgtaaagattcacaccattattcttcatgaaggtaacaaaatcgttaagatgctgcgcgtatgctgcgtacttgttgtatttcagccgtttagccgatgtgtcaccattccgattaaaggtctcaaccatatcacttggaggattccaaggagaagcaaaaacgattgctccgtgtttgaccgcactctttgcagtctccacctctttataccaattatttcgattttcatctacatgaattcttaagattgaaaatcctaactggttctgtccattgccaaaagcagtttctctttgagctgctgtaagatccccagcccaagccggatgattcatccctccaaaaccgcgaatcacttgtttctctgcagatacattaactgttacatcacttgctgccaaaacttcagtagcgcctggccctaacatgactgacagcatagtgaaacatactaatagtacacaaattgttttttttatgcgtggaatcatttattcctctccttcgtcatgtgtcttttacggtattaaaaaatctgcatggcatatccataatggcgggctgttccggtgctggcccgtacttcacccgcctcgtttttaagcggtcccattacgagtactatctttgcgtaaactgccagtaatcaaaattaaacaagtttcctgtacctgttccggtaaatacaaagaatactttgtgcacaccggttgccccgcttaccgcagtttctatttccctccacgtttgcgctccgcctgttgaaggcacattcagagttccaacaagcttaccgtctgcactgtcgaggcgcacttctattttcccgcctaaagtggatgctacatttgctttaaatgacctggcaccgcccgctccgaagtctgcatttcctacagcaatccagtctccattttgaatgcttgttacatgctgattatttactggcccgccgggtgctgtggacttctctgtcaaaatgcgtccattccaagcaaacgtttcagcttctacccggttatatgggtttaaattggaaatttgtgttacacctgcataatttgccgctacctcttgaatagatccatctgcattatgcaccagcttattaatatggggagagcggtatcctttgccggccccgaacagagcggaactgacagtttgcgcatggtacaccacataccactcgtttttaaaattgaaaacagcatgatggttgtttccgccacctccgaaaaatgcacccggatttttcaggaagtgccctctatatgtaaagggacccatgggacttgaactggtcatgtagccgatctcacccgggggtttatcggccgggtgcgtgccgccgaaattgatgcaataggagtaataatatgttccgttatacttgtgcaatcccgaatcttcaaacatgaaaggcgcatcaattgtagatgcacttccaacaacactcgtcatatcaggccccaattttatgactctagccgttttaggattggcccattgtccctgcgttggatttgaaacgccaggaacgcctccgccggcatacaggtaaccggttccgtcgtcatctacaaatactgccggatcaaaaagccatacaacaccagacattcctggcgtacttggcgttacgagcggttttccgattgggtcggtccatggaccaatcgggctgtctgcggtgagaaccccgatacctccgccgctgtttgcgaaataaaggaagaatttatccttgccattaatttttttaactgcgattgacggtgcccatgacgcacctgcccattttgcaattccacggcctccattagctccattggcacctgctaccggaatggctccgtggtctgtccagttcaccatatccgctgaagatatgacgaatactctattcaaattggcaaatgaattatctttaattgttccgttgctattatattcatagtcatcacttgacatatagatgtagactcttccgttataggtcagcgcaaccggatccgctcccaaatgatggtcgataagcggatttgaattccctatatgttttgcaattgtagtactagtggcagcatacgcagacttcccagataagcagctcaataataaaactagaatccataaacatacgctacactttttcctcatcacttcacatcctcctttttccttaaaatgggggattttcttttggaatttgataacaacaggtcacgaagattgcacgcataaagtagccggaagctgtttagcaatgttcccagttgttctgaaagctcatcttcatgtgtctccattctctcttttcttcgaggagatcgcaccactccttcaaaattgttcaaaaaaacttccccattcctagcgaccattgtccagaaaataaaaagacaggattgttcatggcctcccactaatcacattgaacggagattacatcattatccaagatatccctttatctaacatcctacatcattaaaaaaattgtgtatagaaacttttggaggagttagtgttcgattctacaaaggaactggatacatttattcattgataagatggggctaacactccgtttatatttgtatgttttcagacacaaaaaacagccgttcaatgcggctgtttttttcaagagtataagactattgagcggtatacccgctttttcatgttttgttcatattttattaattgtttattcaacactgtccgctatagtaatccatatcaacaaatatgactgccactcgcatcttttatgaagggaggttcgttacgctgaaagaaaaaataaagacattaggccgtttttgcaccgtaggcgtcggcaatacgctgatagattttggtgtcttctttcttcttaccgcttgtcatgtctcttatctgccggcgcagatctgctcctatactgcaggtatcgtcaacagctatgtgtggaaccggaattggacgttttgtgtgaaacgtaaggctgacgggaaagagatcgtgcgttttctcatgattaatattgccgcgtcagggatcacctttttgctgctttatttgtttcaaaattgcggctgctcgcttttggtgagtaagctcgccgccactatcggcggaatgatgatgaattttatcggaaaccgaatctgggtatttggagattcgctgaaaaacatacaggatcaggagtgaagatgaatgagaaaaaaagtgagaaaagcggttatacccgcagcgggtttaggaacgagatttctgccggcgacaaaggcgcagcctaaagaaatgcttccaatcgtcgacaaaccagcaatccaatatattgtagaagaggccgcagagtcaggaattgaagatatactgattattacagggagaaacaaacgctcgattgaagatcattttgatcggtcggcggaattggaattcaatctccgggaaaaaggcaagacggagacacttaaggaaatgcagcagattgccgatttggccaacattcattacatccgccagaaagaaccgctcggattaggccatgcggtgctgtgtgcggagcattttatcggagatgagccttttgctgttctcttaggtgatgatattatggtgtctgaaacaccggctcttcggcaattaatggatgtatatgacgtttatggcacagaggttgtcggtgtacagtcagttctccctgaggatgtcagcaaatatggtattataaatacatcagggtctcaagggcatgtatatgaagtgaacgatttagtggaaaagccttctcctgaagaagcaccttcggaaatcgcagtaatgggacgttatgtgctgaattcttcgatcttctccgttttgaagacaattggcagaggcgcgggcaacgaaattcagctgacagatgcgcttcgtgaggtttgccgtaaggagccgatccatgcccggctgctggaaggaaatcgatatgacattggcgataagctgggctgttttaaagcgagcaccgaaatcggcttaatgcgtcccgaaatgagatctcagcttttggcctatttagaagatgtgatcaaacgggaaacgaaagaaatgctgcggtaaaaaaattgtaaccatcttgctcgtcaatcagtcatataatagtgaaaaagattaggacaggttgtgaagaatgtgggcagtttgataagcgaaattttaacatggctgacgaacatgggatatgcgggtattgcgattgggttaatgattgaaatcattccgagtgagattgtattagcttatggcggctatatggtatcggagggcacgattggatttattggcgcaattattgcgggtgttatcgggggcaccattgcccagatctttatttactggatcggtcgctatggcggcaggccatttctggacaaatacgggaagtatttattgattaaaaagcatcatatcgatatgtcggaaaactggtttcagaaatacggcgccggagttgtcttctcggctcgttttataccggttgtcagacatgccatatccattccggcaggtattgccagaatgccttttctcaaatttgtggtactgactgtgcttgctatcattccatggtctatcctgtttgtttatttaggcatacagctaggaagccagtgggatgatgttgagaatatagcaggcacttatacaacaccgattatgatattggctgttgtcgtgatagccctttattttgtgattaagaaacgtacagccatatttaaacgatagctagcggatatgcataggggtgactgacgctcccctatgcatatttttttacttgcgatgttgatttgccagcttcagattctccgctaaaaatgcgacaaacacttcatcccgcacgagcgatgcggcataatttctcttaataaaccattctgcctcttcaaacgctgcgaatgtttcgtcttgggtttctccgttaatttgaatattccattcgttgtctaaagggaaaagaaaaaatctcatttgtgcgcgattttcatataatgatccattcgcagatccctttagattatagatgttacggaaggcatccggccgtacaggatcaatacggaaagcttcagctacaaacaactcgtatacttcatcggttattgaacagccggacgcttttgcatgccctccgccgccatatcggccggcgatttctgacacatcgatgtaatcatgaatggtgcggagactgactcgttttgaccccatgctcaaaatcgcaatgtaatcgaggtgcgggttatctttccctagcctgttccccagctctgaatggtacgattcagcgtgaacgatgcctacacagtgttcgtgaacaaaggtttgtaccatttcccttttctttctgcggaggtagcgctcgattttttcgtcttctaaatcaagcagtttttcttcaaaatcatcgaagaaaaattcgtcatgcgtggaaaggcgctggatcatttttgcttcaaattcatcgattgacagcaaaaagaaaagatcattaagccgcttcgcctgtttttgatcgtaccgctcccactcccatgtatcgtattggcggacgagctctgtgaattgatctaaggcgtttgtcggtttcatgaagccattttcaatgagatagccatataaaagcgatgtcgcggatgtgagccttccatcatcgtattccacctggacaaatccccattcatgctcattcaaatgaagggctgttttatgatggtcaatgagcttcactttgccccctgcatgaacatactcattcaatctctcttcgttttcttcattgacggcgagatcggtgatgaataacgcgtcctgtctgttgctctccttcgctttttctaaaaagtactgcacctgtgcgtttaagccgttgacagagttataccggatctctacgtcttttccgaacgccaattttgctacgattccgcatcctactccgtccaagtcgttatgtgaatataaatgatacataatgtaggcccctttttatgataaactgacaattgccgctagaggtgcggcagcctttatttactattctaaaaaaccaagcgttttatgcaatggtaattagttgacataatgttgttattgtaaatatataaaggagcgctttttttgcgctcctaagttcttgcttttacaccggataaaccggatgctttcgattggtaaatgtcatttcctttgtcatgtatgccttgagccgtttggccagctcatcacgcagcgaattggctgggataacagcatcaatgatcatttctgaagccagacggtagatattgatgtcctctttgtattcctcccgtttgctgctgataaatgcggctctctcttcttctggcagctcggcgatttttttagcgtagacagcgtttacagcggcctcagggcccatgacggcgatttgggcggttgggagcgctagacagcaatccggttcaaatgccggccctgccattgcatacaaccccgccccgtaagcttttcggacaatgacagagagttttggaacagttgcctccgacatcgcagaaatcattttcgctccgtgtctgataatcccagcctgttctacttttgtgccaatcataaaaccggggatatcggctaagaacagcaatgggatatgaaaagcgtcacataaggtaataaacttagccgctttgtctgctgaatcgtggaataagacgcctccttttaccttcggctggtttgcaacaatgccgacaggctgtccgtggattcgtgcgaggcccgtcaataattccggtgcaaataaggctttgatctcaaaaaatgagtcttcatctatgacccgctcaatgagctcatgcatatcaaaaggtgcgttttgattttgcggaatgacgtcggcaagcggagtttcgaagtgttttggcgggcgtttctcatgaatgggcgctttttcttgaaaatttgccggaaagtaagacaaataagcccgcaccagctgtatggcttcttcttcagtttctgcaagaatatctccgcagccggagattgagcaatgcatacgggcgccacccatttcttcgagagacactttttctccaataaccatttccgccatccttggcgaacctaaatacatggaggcgttaccgtctaccataacgacgatatcacagaaggccggaatataagcgcctcctgccgcagatggtccgaaaagcagacagatttgcggaatgcgtcccgataatttgacttgattgtaaaaaattcttcctgcaccgcgtctccctggaaagacattgatttggtcggtaattcgggcgcctgccgaatcgactaaataaatgagcggacagtttaatttttcggcgatttcttgaattctgatgattttttcaactgtttttgctccccatgaccccgctttcactgttgaatcattcgccatgacgcaaacggtttggccgccgattttgccgatagcggttacaactccgtcagcgggaagcccgtctgacatacattccgcaaaaaaagcgtcttctagctcaatgtcatcgtcaaagagaagggaaagccgctctctgacaaagagcttgcctttttcccgattgctttgatgatacttttccgctccgccttttcgaatccgttcagcccgttctgttcgttccttttcataatccatcagcattgcctcccttttatattcccttgtatacggcccgtcttttttcttgaaaggcctgaagcccttctctcctgtcttttgtcgggatggtttgttcatacgctttttgttcaatcgcaaggcctgtagcaagatctgtctccaatcctttattgattgcaaatttagcctgacggacagcgatcggtccgttggcagaaatggctgcggccagttcctctgcttttggcataaggtcacaaggagccgtgacatgctctacaaggccgatttcttttgcttcgtgtgcggtcacgcgtctgcctgtataaatgaattcttttgcttttcctctgccaatcagccggggcagcctttgggtccctccagcgcccgggataatagctaaccctgtttccggaagtcccagcacagctgcttcagttgcgattcgaaggtcgcatgccaatgccaattctagtccgccgcctaatgcgcttccatttatcgcagctatgaccggctgcggcaaggcatcaagtaaagccgccgttctttgaatgagagatacactttccagaacctgatcttctttcagttttatccgttccttcaggtctgcccctgcacaaaacgctttttcaccggtgcctgtgaggatgacgcaacggatgtttgagttaaattcaatttcctggataatcatttgcaggtttctaagcatttccgctgaaagagcatttgctgcctgaggcctgtttaaggtgatcaacgccatatgttcatttttaacagtaaaaagaatagaatctcccattgtatgcgtcctcccttttatcaagatgatttaaacacctgtaaatttctgctcggcagcggtttgcccattttttcttcaatccatttggccgcagatagcagtttttctagctttacatttgttttgatatccatctgttcaagcatgtacacgatatcctcagttgcggcgtttcctgatgaacctggcgcatatgggcatcccccaagcccgcctgccgagccgtcgaacaccgtgatgcccatttggagtgctgtgaccatgttggccagagcggttcctctcgtatcatgaaaatgcagggcaatttgattagccgggaatcgtgccaaaagagcttcaagtacagtttccacttgggcgggattagctgctccaatcgtatctccaagcgacagttcagaaatcccaaattcaaatagagcttctgaaaggcgaatgacttgttcaatggggacatctttttcgtacggacagccgaaaacagtcgagaggtaggctcttgttgtgaggtttgctttttgtgcgtcgttgtttacttgtttgagtatatggagggattcagaagtggatttattgatgttttttctgttgtgcgtctcgctggcggacataaaaacgcaagcctcgttaatgcctccttcaagtgcattctccagtcctctttgattcgggacaagtgccgcgtacgttacccctttttctcggtcgatgccttttgctacatcgatagcatctcgaagcgccggaatccatttcgggtgaacgaaggatgtgatttcaatatacgacagccctgtccgggaaagctggttgatccaggttattttatcctctgttgcgatccaaacgggctcgttttgtaagccatcacgcgggccgacttctttgattgtcacttttttaggatatggcatggtcttcctccaaattattgagtggaattgctcagttcgagcagtacgtctccttcatttacaaagtcgccttccttttttttgacttcttttacgattccgcttctatctgcaacgatcgggatttccattttcatcgattccaaaatggctacctcctggcccttttcgatttggtcgccggctttgacgtggactttccacaggtttcctgccatttgtatgctaaccgtcatgacaactgcctcctttataggtgctgtttcaaaaagtcagtcgtgacatccccttctttaaatgcctttgttgccgcagcctgtatgaggagcggaaggtttgttttgattccctctacacgatagtcgcgaagcgctgtctctagtttttcaattgcttctgttctggtttggcctttgacaatcatcttagcgatcatcgggtcataaaaaggggtaacggtgctgtcttttgctaccgcacattcgtgtctgactcctttttggtcaggaagtgaaaacgcagtgatcgtacctggtgacgggaagaaggtcttgggatcttccgcgtatattcgaacctctatcgcatgcccgttccgttggatgtctttttgggagaatgtgagtgtatggcccgcagcaatccgcagctgctgctcaactaagtccaggcctgttatttcttcagtcacggggtgttcaacttgcagtctcgtattcatttcgaggaaataaaaattttgtttctggtcaactataaattcgatggtgcctgcgttcgtatagccgattgccttcgctgcttttaccgctgtttgaccgatcttcattcttagttcatcgtctacaaatggagacggtgcttcttcaatgactttttggtggcgcctctgaacagagcaatcacgttcaaacagatgtactgtatggccgtgttgatcggccaaaagctgaacctcgatgtggcgcgcatgttcaataactttttctatatacatagacccgtcaccgaaaaaatctgctgcgcgctttttgtttccctcgtacgctttttttaatgcttcttcattttcaacacgctgcattccgatgccgcctccgcccgctgaagctttcagcatgacaggatagccgatttgacttgcggtgcggcaggctgcctctatatctccgagggattcagaaacgcccggcaccacagggacacctgcagcctccattgcttttcgcgcttcaattttgctgcccatctttgcgatgatatcaggggaaggtccgataaacacgatgttttcttgcttgcagcgttcagcgaaccggctgttttctgataacaatccatatcccgggtggatcgcgtcggcttttgcttttttcgccgtctttatgattctctctatatttaaataactttcactgactctcgattccccgatcaaatatgcctctgtagcggcttttgtatggggcgcgtccttgtctgcttctgaataaacagcgaccgttttaatgccgagacggctgcatgttcggataattctcattgcaatttcaccgcggttggcgatcagtacttttgtaaacatgatttcacctcattgacttgatgataagttgaacatttcaatcgttttttctcgcagtttatatttttgaattttgcctgaggccgtcatcggatagtcatccgtaaaaataacataacgcggaattttgtggcgggcgattttccctttgcaataggctttaagctcatcaggtgaaacgcttttaccgtctttcagtttaatccaggctgcagcttcctccccgaatttggcgtcaggcacaccaaccacctgtacatctaaaacagcgggatgctggtataaaaattcttcaatttcccgcggataaatgttctcgccgcctctgatgagcatatcttttaatcttccggtgatgcggcagtacccgtcttcatccatgacagcaagatctccggtaaacagccatccgtcatgattgattgcttttctggtcgcatctttgtctttataatagcctttcatgacgtgatagccacgggtgcacagttctccctgcatgcctctttgaacttcttgacatgtcccgggttctacaattttcacctcagtatgtggcagggcacggccggttgtttcgactcttcttatgaaggaatcatttgctctcgtttgtgtaatgactggcgaggcttcggtttgtccataggcgatcgtaatgtctttcatgcccatcctttcaatcacagctttcatcacttcacttggacagggagagccggccatgattcctgttcggagcgtcgatagatcatatgcatcaaaatccggatgatgcagctcggcgataaacatggtaggcacaccatggagcactgtgcatttctctttttctaccgttttaaggacggtaacgggatcaaattcttgcacgggtatcatggctgccccgacggatacacatgccaaaaccccaaggacgcatccaaagcagtgaaaaaacggaacagggatgcacatgcggtcttgagaggttaaagccatacattcagcgatattagcagcgttattgatgacattgaaatgggtcagcatcacgccttttggaaaccctgtcgttcctgatgtgtattgcatattaatcacattgtctttatccaggctgttcattctctcttcaagctcagcatctgtcactgttttcgccaatatctctgtatcgtcccaatgatacatgccagacaatcgtttattgccaatatagatcagcgtttttaaaaagggatagcgttcagatttcagttggccgggctttgcttcttgcagttctggaattaaactgttcacgatgtctggataagaagtgcccctgtatgaatccatgataataagcgccgcggcatccgattgctttaacaagtaatcaagctcatgtgcttgataattggtattgacggtcacgagcacggctccgatcttcgcagttgcgaactggacggcaagccattcagagatattagaagcccatatggcgacgtggtctccttttccaatccccatccgcatgagacctttagcggtttgacggcacagactgtcaaattgagcgtacgtatagcggatatttcggtctggatacacaacagcatctcgatcgggatacgcatcagctgtttgttccagcagcctgccgattgtggaatggatgagttcagccattcattgttcctcctttcttaatgataggaaagcgtttacatttttattttaaaagctgtctggcgatcacgagacgctgaatttcagatgtgccttcaccgatttccattaattttgcgtcccgcagcatccgttccaccccatactctttcatatagcctgaacctccatggatttgaatggcttgattgcaagctcttgtcgccatttcagatgcgaatagcttggcgtacgccgcttctttggtgaacgggcggttatgatctttcagccaggcggcttttaacaccatttgccgtgccagatcaatttccatcgccatgtcagcaagcttaaattgaatcgcttgaaaggaagaaatcggctgtccaaactgctttcgctctttcgcatatgccaatgatgcgtcaagggccgcttgggcaatgccgactgcaagagcagcgatggagattcgaccaccatccagcgtatatagaaactgtttaaacccttttgttggatcgccaagtaagttggccgcaggcactcttacatcttcaagcaagatttccgctgtattcgaaccgcggacgcccattttatcgtacgggctcgtaatcgtaagtcctggtgtgtcagttggcacgattaatgcggagatgatgttttttccgtctttgtttttgcctgttacggcggttacaataactgtgcgtgcgtagcttgcattagtgatccagcacttttcgccgttgattacatactcgtcaccatttgaaatcgcttttgtttgagtgcctcctgcatctgagccggcatttggctccgtcaggccgaatgatccgagtgctgtgcctgaagccagcggcgtcaaatgcgtctgtttttgctcttctgttccgaagtagtaaagagggcttgcgcctagcgagaccgctgcagcatagcttaatccagtactgccgcaggctttgccgacttcttcaaccgctaaggcatatgaaatcgtatcaccgccagatccgccgtattcttctggaaatggaatacccatcagaccgagttcacccatttttttaaatgtttgcatcgggaactcgcctgtttgatctacatgttcagcgtgaggagcaatttcttttttcgcaaaatcttttaccatttcacgcaccatttgttgttcttttgtcagctcaaaattcacatcgtttcctccttcacatctttgtaacatcctattaggcgagttctataatcattccctgacaagaaaagtctgaaaattaaaactgaatcattttttatgtgataatatcagcgggatgagcaaatacatgcagtaggcgcataccatccatatcgtaaacgcaataacttggccctttgataaagccgggaagatgaggggaagattccaaagggaaatcgtatccatcaataaaccgaccgctgatccccatatacctagcttgatcaccgcgaactgtgattgatcgagtttttgatagagaaagaacacaaggcataaaacaagagcagtgcccgctcccaagagaagaaagttcggcaaaaaggcttcttcagccggatcagtcaacacagcatctccgaacagcacaaaaaataatgtggcacctaaccagactagaaatgaaaacgtaaaacacgtcctgtacgtgtttctcttcgattttatttttatttagtactagtttctcagattccaataatggtaaatgtccaaacaccgcctccatattcatgtgaatctcacctttgttttttaaaaaattcagcggtttaccatcgtttcctgtcccaaaatcactttttaaaaaaagacgacttagaaagccgtccttctcatttcttattttgttgttcgtttggaagctttgctttcgttatgaagccggtctgctgaagtgacataatacgtatatttcttgttgggatctgccgtgttatctaagaaggtttgctgctcatgtgtttttctttgcgttgccagcaatgttctctgctttttcccttcggctctgtatatcgcataataggctgtttctttcgttttttgatttgatgggtgatctttaatctgcagaagattgccgtttttgtcttcggtgactttcgtaagcttcggtttttttggggcggtattgtcaagccaaggcatttgcggaaccagtgccggcttgctgtaaagatcggtgctgagactgtctttgatgccaagcggatttttgttgaggtccttgaggctgaaatgcatgcttcctttcaccagttcaagctggcggttcaaagtgatttgccgcacatattcctcaggatcggaccaaggcggatcaaaattgttattgattttatatgctgcctggccaatatataagtgaacaggcctatttttgacttcattgctccaccaatcagccagcacgtcgtaagccgctgcgttaaagccgatactccaataaatttgcggagcaatataatcgatgtcgccttcttggatccaatgccttgtgtctgcatatagatcgtcataatttctgacgcctgcttttgtattcgatccggtcgggtcatctgcggcgtttctccatactccaaagggactgatgccgaatttgacatacggttttgcagctttaattgtttggttgatttgtttgacaagctggttcacattgtcccgccgccagtcatcgatattagaaaaagcgtcttttccgtattgttcgtactgtgcttgatcaggaaattcctgtcccgctattttataagggtaaaaataatcatccatatgaacagcatcgatatcataatgttttacgacttcttcaatgcctttgacgataaaatctctcgcttctggaatgcctggatgataatacagctggtttccataggcggcaacccaatctggatgttttcttgccgggtgatcctcagacaatttattaagatctgtatgattcattgtaatacggtaaggattaaaccacgcgtgaaattccaaatttcgtttatgggtttcttcaatcataaatgcaagaggatcatagccggggtccttcccttggacaccggttaagtattccgaccaaggcccgtaagctgacggataaaaggcatcagccgtcggtttaatctgaacgataacggcattcattcccattttttgcacatcgtccagcagtttgatatactcctgtttttgctctttcacagataacccttttttggacggccaatcaatatttaatacggaagcaatccatacggctctcagctccctgtcagactgcgcattggccataaacggaacggaaatgacaaacgttccgatgatcaagctgacaaggaaacggacaatcgacttttggcaaaccttcattctgtttcttctcccccattacatcactttcactattcgctattacggtattcccgggctataaaagggtgattaacagaatgtctatctcactaaataaacgaaaaaagtcctaaagcatgttgtgaaccgcttttaggactttttatcattcatcatggtttgcagactttttaacacatcaataagttttacgccgacaccgacagccgtttcaaggatcgcttgtgctccggcaatggctaaaataaagatcagcggtattgcaatacgaggcaaaaaaagatagccaagtccgatcaagatggcacaccaaacaccggcacaccagtagcaattgagcatgtatccaaagttagaagccggcacgcttttttcatctacatgcccgttttgatcaacaatccttttctttttcataaaaggttttcggataaattctgtgattttgtcaaatacaatcaaatgtgtcagcctgtaactggctagaatcagcatgataaaagttagaaaagaaagacggtccattgagaagcctccaagaaaaaggatgatgttatcattcccaagtgtcccttatccattcttgatacaaaaagaaagacggacagagaatggcctctgtccgctaatccgctttatcgtttgtgcagtattacttgatttgaagtgatcttttctaaaatgtcgaggatgatgtcggcattcttttcagcatatgttccttccagcatgtctttatgagcgccaaaacccgtgtactcactatagtttccgcaggcgccttcccatttcgttaagcctgtatgcccgctggtttcggggtggattccagcttcgatgaaatgaatgcttgctttgatgtggccttcattcagcaattgtgcccaatattcctgatagtttctttttttcttcatcaccttttctctgactgcttcaggcagatatgctgcagattcgtcattaccggtatcgataggcaaaggctgttcttttagataagcgtccacgataatgaagtcgctgacttctaatcctttgcgctccatagcctgtgccacttcaaaagccaggtttccgcctgcagagtagcctaataaaacgtatgggccctcaggctgtatgtccgtcatgcaattaacatattgttcaatgcgggtgtcttgttcaataaagtgaaacccgtatacggctgccttctcattcagcaataaagcaaggtctttaaaataaatgccaaatcccgatatcggcgggaagcagaaaagattttgcgcgccgtgctggttcagtttgatcacatgctgttcatttgctgctgtcagctgtttagaataaagtttttcggcaagctgagcgattgtcggatgttcgaacaagaaatcaatcggtatgtcaatgttctgctgatgttttagtgtatgtatgacttgcagtgctcttagtgaatgtccgccaatagcaaagaagtcatcatcaatactgattgtgttaacaccgaggacttgcttccaaatgttcgccaattcttcttcaaccaagtttcttggcaatatgatgttctgtcgtttggcaggcttattttctggaataggcagcgcgctgcggtctatttttccgtttccggtaagcggcatccgctccacacgcacccagtgctgcgggatcatatagtctggaagcacacgcgccaaatcggcgcgaaaatccgtatctgtttttttgtgatcaccgacgtaatgagtgtacagctgcgcctctccatctttttctctcaatgtcactgctgcttcttgaacgccttccatttctaacaggcgcgcttctatttcggcaggctcaattcgttttccgcggattttcatttgcctgtcaattctgctgatgtattctaagtttccatcaggcagccagcgcgccaaatcaccagtacggtatattctttctccaggcaagaaaggatgaggagaaaacacagcatttgtcagatctactctgttcaaatagcctttagcgactccatcaccgccaacacaaagctcgccgggaacgcctattggcaaaagacgtccttttgtatctaagatgtaagcggtgctattactgattggttttccaatcggaatcggccccgcatagtctctcttcatttcaaaaaaggttgaaaaagtcgtgttttccgttggcccgtaaatattatgaagcgcgagatctggacaggcgtgtctgacggcattcatcagggcaggagagagtgcttctcctccgacatataacgtatggagtccgcgaaacatgtcagctcgtacctgtgccagctgattaaaaagagctgtcgttaaaaatagcactgtaatgtcattttcaagcaaatacgctccaaaccgatcaggtgtcagcattgtcgatttatcaatgatatgaaggcttgcgccatttaaaagtgccccgaacatttcaaaggtgacggcgtcaaagctgatagatccagtcataataaaccggtcatcaccggacgcagacgtgtaattgctgtttctgacaagggacacgacattgcgattcgtgatcatgacccctttcggccggcctgttgatcctgaggtatacatgatgtacgcaagatcatccgggctggagctgatattaatagggatatcgttctcttccatcaatccctgcgcatctgaaatgatacatgttcctgagaacgcagcgttttgctccaatcccttttgaacaatcagcatttttgcctgcgtttcctcaagcataaagctgactcgttcaggcggaagctccgcatcaagcgggaggtatgctccccctgcttttaatacggcaagcacactgatcatgaattcgggagaatgtgcagccaatattccggctgtctcgtttttccgaaatcccttttgaattaactctctggcgagcgcattagagcgtttatcaagctctttatacgaaatagacatattgccatacacaagtgcggtatggtctggcgtcttttctgcttgttcgcgaaataaatcgataattgtatgattctttggatactccgtttttgtattgttgaactgtgtgacaatctgctctttttctgttgcatcaagaaaagaaaaatcagcaattggcatatgagggtgctgtgcagctgtgctaagcgcttgcgtaaattgcctcttgatacagctgatccaggcagcatcgtaaacgaatgcattatagctgaacttgatgacaagctcttcgccaggagcaacgacaagattaaagttatatcctgattgctcggatacttgaacttgatcgatttgcagcggtgaatcggtttgatcagcggaatcggcgattttctgctgtaacggatagttttcaaagacgataatgtgatcaatcagttcctgttttaatgcggtgtttgcctgaatatcaaataaaggctggcaggtaaacggctcagcttccagcatttctttctggcagcgtatgagcagctcgtgaaacgtttcgtcttggtgtgttttaattcgaatcggtatggtattgataaacaaccctatcatttgctccacgcctgggatttctgacggtcttcctgatacaactgcgccaaacacaacgtcgtctgtgcggttatattgctgcagcatcacaccccagactgcctgaataagggtagcgagcgtgacgccgtgttgtttggcagtctctttcagcttgtctgtcagtggtttatttaatgaaaatatcaaatcttcacggtgataactttcttttgtttctttatcagacacacgaggcagaggtgatggagcgctgtagttttttaaataggtatcccagtaggccgctgctttttctttgtctcggtttgtcagccatgaaatataggtgctgtacggacggacagggtctaatgaaagcggttttcctgcatgaatcgattgataaatttgcataaattcctgcataacgatacctaggcaccatccgtccattaaaatgtgatggtgactccagatacagacatgctcatctttagctgttttgaatagagaaatccgcatcagcatgtctttttgcagatcaaagcctttttgcttgtccttctctttaaagcgttcaatatactcattctggtcgtttgtcggcagatgagaaatgtcttcgctgttcaaatggaattcacgttctgtcatcacgacttgccgaggtcccgacaaatgcgggacgtgcggcaaaaacacggttctgaaaatatcatggcggtcgataatggcttgaatgctgcgctggaaccagtcatagctgaggcttcctttaatggtgaagagcgactgctcaacatacgccccctcctctttacggaggaaggaatgaaacagcatcccttcctgcatatgactcagaggataaatgttcttgatttttttaatggtattcatagtgtctgcacctttcttcacggattcattagtgaaaactgagcatatcagcgatctcttgcagggcgtcctcggtcagttcttgatcatcaaaatcactgatcgtcttttctgtttcgcttttgttctggcagtgttcgatcagctgtaataaaaattgacggcatgtttcgctaagctgttcgatggttttgcgctgaaagcgggcattgtcataagtcatattgacagtcaattttccttctgcagcgattgcgctgatatccagcgactgttcacggttccatgttgtgctgatatcacctccggcacccagcggagagaatgagaaggcgtcctcctcaggtacttcagctgtgcggccgctttcaaattgaccaagataattaaagctgatttctggtgcacctgtgaaattgatgtcttttttgccaggcggagtcaaatatttgatgacaccgtagccgaatcctttgtcaggtacacgtctcagtgtatcttttgttgtttttagcacatgaaccatgctttcttccgaatctggcaagtctgcgttcagtttaatcaataacggataaatggcggtaaaccatccaatcgtccggctcacatctattccttttaatacatcctctcgcccgtggccctctaatgatagtttgaaggcggattgattggtccaatggcgcagcgcaagaatgacagaagcgagcagcatgtcctgcgtatcagtgttatatgcgctgttggcgtcttttaagagtgctgctgtctctttatcgtttaaggtaaacgaaattgtggaccgttgtccctcgtgtgctctagttccatcgatttgatcaaaaggcaatgcctctgtttgatactcttcggcttcgcgccaatacttgagctgtttcattagctgctggctttcagcgtagtcagagagctttttcgcatacgctttaaacgagcttgttttaggcggcagtttgatatcctccccgccagcagcttggcgataccctaaagccaaatcttcaagcagaacccgccatgagatgccgtcaacgacgaggtgatgagcagataaaaataagaaatcaccgtcaattgtgtggaaaagaccggcttgcagcagcggaccattcttcaaatccattttctgctgaatatcaagtacatggcgcttgataagaggttcatacggtctatttccatcagtgccgtccggagctgacaaatcaatcatctgaaggccgtacaacgcgtcgtccgaatgactgagcggccgattatattgatcccactttccttgttcattctgtgtaaacaccattcgcagcgcatcatgatgacacgttattgcttttaacgtttttcgcagtgcgtcttcttgtacagaggtgcttcgatgcagcattacggactgattaaaatggtgtttttcttttatatcttgagaaagaaaccatttttgaacaggcgaccattgtacgtctccctcaaccgcagcttggctggaacttgtatctgaatcacggatataagctgccaattcttgaatggtcggatggctaaacaaatctttcactgccatttgcttgcctatccggtgaagccgcgcagatacctgtaacgctttgattgaatctccgccaagttcaaagaacgaatcagctgttccgatcttttctgcccccagtacttctttccatatatctgccagtatttgttccattttgctggatggcgggaggaatggacgttcaccttcgtggttgtatacaggttttggaagtgctccgcgatccagcttgccgtttggtgacaatggaagtgagtccagtttttcaataaacgcagggtgcataaacaccggcagcttgttttgtaattctgagcgtacagcatttgtgctcaaccctggttttgtcaccacataagcgcttaattcggtttgtcctgacgctgttacatgagcaactactgcggcgtcttttacaccctttatacaccggatgaccgattcaatttctttcgtttctacacggtatcctctgattttgacttgatcatcgattcttccgagatattcgagtgtaccgtcggccatccatctggcggcgtctcctgttcggtacattcgtgcttcgggtttaaatggattctgcgtgaatgctctctctgtcagttctggaagattaacgtaccctcttgcaagccctgttcctgctatacaaagctctcccgcaacaccgattggctgaagctgatgattgctatttaaaatcagcacttgagttccgtcaatcggctggccgatgcttacgtatgcctgcttttccatatgtctcatgacggtagtcgccacgctgttttctgtcggtccatattcgttggcgagttcggtatgcggacatatagctaagctgcgggcgatcaattcgcggtcagccgcttctcccgccagtgtgacgactctaagcgtctttacatcttccggctgcactacgtccaaaagcgctcgatataaaacaggcacaataatcatatgtgtaatccgttgacgagacagctgatgcttaatggccagaatatccttcgcttcctcttcatgaagcaaaacggcttttgcacctgacaaaagcggtgtaaacatactagttataaagccgtcaaatgagaaagaaaagagctgcagaatggtatctgtctcgttgaatgcataagcgtttcgccgccactgaagagtgttagcaatccctttatgctcgaccattaccccttttggacggcccgtcgttcctgaagtataaatgatataagccaaatgatgggcagacgacatttgcggcagcggcgatttgtcgtcttcctctacgctttctatcgtcaagatctctccttcaaagtcagcaagtactcccagatccgcttcatttattgtcatcagcagtttcgttccgctgtcgctgaggatatagcgtttccgttctttcgggtattcaggatcaatgggaacgtaacagcctccggctttccacacaccaagtatggatgctatcatactgaacgaacgatgcatcatgatgcctactggtgtgtccggcttaacacctcggctgcgcaatgcacgtgcgattccattggaccactcgtcaagctcctgataagtgagtgttttgtctccgctgacaagtgcagaagcttttggtgttcgtgcagcttgctgctcaaacaattgactgattgtttgaactccgtattgattcgcttgcccggtgttaaactcattaagcagctggtgccgctcttcttgggtcaggatgtcgatatggttgagtgtcaccttcgggtttttgccgatgatgctaagtacatttgttaaatgcgatgcccagcgttcaatggtggttttctcgaacaatgcggttgaatattcaaaaaggaaatgaatgtttccgtcgccctcagatgcctgtagtgtcaaatcgaatttagaaacgagatgagaaacttgtgccggcttcatttgcaaatcatgaagatgcaatggctcgtaatcattattttgaacaactaacatcgcatcaaacactgggttccggctcatatctcgtgtcaattcaagcttatcgacaagctcttcgaacgggtaattctggtgctcaaaggcttccaatgctgtctcacgcacttcctgcaaatactgtacgaatggcttcccgccctccgggcgcgtccgaagcgccagcgtgttcacaaacatgccgagtatcggctcaagatccttgtgcggccggccggcgattggcgagccgacgatgatatcttcctgtccgcttaagcgtgacaagaacgcggtgtaagccgcaaggagcaccatgtacagtgtgcttccgttttctcgtgccagcttgtgaaggcctgatgcaacctctggttccagcgtaaatgagaccttgtcacccgcgaagcttcgcaccggcgggcgggcatgatcagcggggagatccagcacaggcagctcgccctcgagctgcttcagccagtacgcctcctgcattttgtacgcgtctcctgttttgaatccttcttgccatacggcataatctttatattgaatgcgcagcgccggaagcttccgattattgtacagctcgccgaattcttgaatcagaatgttgacggaaacaccgtctgaaatgatgtgatgcatatcaaccagcaataggtgccgctcatctgatacctttacgatttgggcacggaacagcggcgcttggctgagatcaaacggtttgataaatgcggctgcggcctcctgttcggttcgtgcgccgagaactgtagtctgtaacgtaaacggcacctcgtcatggatgcgctgcaccggatcgcctccttcgtcctgttcgaaggaggttcgaagcgactcgtggcgcttgatcagctcttggaaagctctgtccatcctttcagggttgagcttcccttcgagctctaacacagccggcatattgtagcctgtccctccgtcctccagctgctgaaggacataaatccgcttttgggcagaggaaaccggataggtttcctgtttttcagcgggcttaatcgcttcatatggactgtccgttccttcacggataacggtagccagtccttctaccgtcggatgggcaaacacatcttttagcggcacctgtacatcgaattctttggtgatccgtgagacaagcgccgttgcttttaaggaatgtcccccgcggtcaaaaaagttgtcgtgaatcccgacagggccatttttcagcacgtcctcccacagctgagaaagcttcatctcagtcacgtttctcggcgctgtgtaggtctccgcatctgccgctccgccaggagctggcagggcgtttcggtcgagctttccgcttggcgtaaccggccactgttccatctctatcatataggctgggaccatgtagcccggcaacagtctctcaagctgcgctcggacttcgtttctttggagcccttctacataagcgcataattccggctccccgctgtctgtccgtacggtaacggccgcctctcttacaccttctatacttcttagtgccgcttcaatttctcccggctcaatccggtagccgcggattttcacctgatcatccgtgcgcccgaggaattcaacattcccgtcagggagccagcgcgccacatccccggttttgtacatgcgttcacccgggtaaaacgggtcttcaagaaaacgctcctccgttaatgccggccgattcaaataacctctggcaacacccgctccggctatgtacagttcgccgatacatccaacaggcagcatccgctgattctgattcaggagatataatctgacatgatgaacaggttttccaattgggatccgttcaagtttttcatgcggcggacaatcaaagaatgcagcttctacggttgcttccgttggcccataggaattggttattgaaacatttggaagcaactcgtaaaatcgggagacaagatgggtccccagctgttctcccccagaaaacactcgcttgagtctgtttgtcttaatcggtacagagcgatattttatatgttctaaaaatgcatggagcattgaaggcacaaaatgcatagctgtgatcttttgttcttctatggccttcgcgatcacttcaggttctttttcgcctccctgaggaagcagataaacagaagctccggcataaggccaccaaaacagctcccatattgaagcatcgaatgaatatgatgttttgtgcataatcatatctgaatgctttagctgatagcgggactgtagggaattcaaaaaattcaccgctgatcgatgttcaatttcaacacccttaggcatcccggtagagccggatgtatagatgacataggctaaagattgcgggagaacatccacattcggattggacaaacgatgtgccagtccgctatttgtctgattgagatagacaatctctcctgtaaattccggaacatgaaggccggcagactgaagcaggagaatgtttgtaccgctgtcctccagcagaaagctgattcgttcttccggataatccgggtcgatgggcagataagcgccgccagctttaagaatgccataaatgccaagcagcatttcaggtgaacgctttcctataatggcaacagtcgtttcgggttttaccccccgtccgatcagctcccaggcgatacggttagcctgttcgttcaattctttataggtcatcactccatcttcgaagataacggccgcctgatcaggcgttttttctgcctgctgttcgagtgcatagtggagcgtttgattcattgaatagcccgtctcctcaaacagatggcatgattcaatgaaatctcgctcttcttcttttgttaagattggaatattgtccaattctgtttcaggactggcagctgtatgttccacaagcgtggtgaaaaggctggcccacctttggatggtttctttctcaaacaaagctgtactgtattcaaactgacagaaaagctcggaatcatgctctgtaacgtatagggaaatatcaaattttgatattgggtgctccaagtcgttccactgaagctgtacatcattcatttttagcttttgctgttccatattctgaaggactagcgttgtgtcaaacaaaggattccggctcatttcccgctgcacaccgagtttgtccacaagctcttcaaacgggtaatcctgatgctcatacgcttctagtgccgtctgtctgacttctttcagaaattcctcaaatgtcttattacccgccgggcgtgtgcggagagccaatgtattgacgaacatcccaagaacagcttcaaggtcggcatggggccgtccggcgataggtgaaccaatcacgatatcatcctgaccgcttaaccgagacaaaaaggctgaatacaaagcgagaagcgtcatataaagcgtgcttctgtttttatgggcgagccgctttatgcgggccgtgatctctttgtccaattgaaaggttacttttccgcctatgaattgccgttctgccggacgtcgtttatctgttggaagctccagtataggaaggtccccgctaaactgctgctgccagtaagtctcctgcttttggtacgagtctccctttttaaatttctgctgccatacggcgtaatctttatattggatccgcaatggcttaagctgccggtttgcataaagatcggtaaattctcggattaggagctgaacggatacgccatctgaaatgatatggtgcatatccaccagcaatacatgcttctcgtttgacacttctataaggcctgctctaaataatggcgcctggctgagatcaaagggacggacaaatccctcgatagtggtctctttacttaacgtaaacggcacttcggtgtggatacgctgaaccggctcgtcatcagctccggatacaaaggaagttcgaagcggctcatgccggctgatcagttctttacatacagcagacagtttggcgacatccagtgcaccttccagttctaagaccgcaggcatgttataggcgacaccctcatcaagctgttgaagcacatagattcgtttttgggccgaagatacaggatatgtatcccttttttctgctggttcaattgctgcatacagattttgttctgcctctcgaataattaaagctaatccttcaacagtcggatgagcaaagatgtccttaagtgaaacttgcacatggaattcctttgcgatccgtgacataagcactgttgcttttaacgagtgaccgccattgtcaaaaaagttgtcttggatgcctatatgcccattctttagcacatcttcaaatagttgcgaaagctttgcctctaacagatttcgaggggcagtatatgggtttccgctgattgaagcatctggctccggaagtgctgcgcgatctacttttccgtttggggtaagaggtatgctgtcaacccatatccatttcgccggaatcatgtattctgggagctcactagccatataactgcgtaaatctattgtgttcagcttttgtacactgcaatagtaagcgcataattcatgttcaccgttttgatcttgccagatgagaatggcagcctcactaatgtccggatgattcattagcgtgacttcgatttcttgcggctcaattcgataacctctgattttcacttgattgtctgcccgtccgatatattcgatgttgccgtcttcaagccgtctggccaaatcacctgtccggtacatgatcacatcaggcttgaatggatcggatgaaaatttgtcgcttgtcagtttatcgtgattgacatatcctctggcaacacttgcgccggaaatatagagttcgcctggtacgccgcatggctgaagctgtttttgatgattcaaaatatatagatcagtacagcctatcggtttaccgattggcggaagctcaggaatagggtctccaggatgaatggtatacgtagataccacatgagtttctgaaggtccgtaatgattgtgcaggtgtatgccgcgtttacgcaacacatcttggaaaaggtctgaaatcattaattgttccccggctgcgatcaggtgtttgacgccatcaggaaacgagttcgcaagttctcgctcgctgaaaatcattttgataaaagcagttgggagaaacacaatattcgtctgatgcttgtttataaatgcaaacagctgaggcacatctctttttatggcttctggcacgatgtggagtgtgccgcctttcagaagcgcagaaaatatttcttgatagcagacgtcgaaggaaggcgtcgcaaattgcagaacatctgcttcaaagtcaatgccggagtgagtatattcgaacttcagcaagttagccatgtttcgatgctcaaattgaacaccctttggtttacctgttgtgcctgatgtataaatcatatacagcagatcgtcagcattgttgactgactttatgttactgccgtctactttgctttcgatatcttctggatgagtgataatgtaattgtcttctaacgatgagggaagatgcgcttgtgaaacaacatgcgaacagccgcaatcatgcagaatataacggattctgtcagcagggtaatgcggatcaaccggaacaatggcgccgcctgctttcaagataccaagaacacctgtgataaacgccgctgagcgttccatcataatcgcaacgggttcctgtctcacaacgcctttcattcgtaaatgccgtgccaatctgttagccgctttattcagttctctgtatgttaatgagcaggcttgatcaattacagcatgagcatctggtgtcttttccgcttgcttttcaaacatggcatggatggtttcgtaaactggtgtttgatctgtgatttctccaatcagctgccgcttttcagtatctgtcgtgatatcgatttcttcaggtggaagattcggattatttaagatttgtgatacagcattcagaagatgctctttgacagagagcacaaaagaccgatcgtgctgctccgcatcatagttcattttgatatgaatttcttcccctggcgccaccataagataaaagctgtagttggtttcatctgcgacagtgaaattatgaatctgaaaaagatcagaagcatgttcctgtttgttcagcatttgaatctcttgctgcaccggatagttttcaaatacgagaatatgatcaatcagcccttgcttaacagctgagcgggattgaatctcatataaagggtggtagctgtacgcttcagcggcaagacggtctttttgcatatcttttataagttgaagaaaaggcgtttttgccccctgcacccgaaccggcatcgtattaatgaaaagacctaccatatgttcaatgccttcgatttctgcgggtcttcctgaaatgacagaaccgaatacggcgtcatcgttattattatatttttgcagcagaatgccccaaatggtatgaaaaatcgtactgagtgtcacttcttctctagcagcaagctctgaaagcctgctgctttcttccttagagaatgaaaatgtaacgtgttcctgcctgctttttccctttgtttttttctgcttcgggagcacggtttgctgttcgtggccggaaagataatgatcccaataagaaaccgcctgctctttgtcttgctccatcagccatttgatatactttccgtatggctggaccggctccaatgttattggggatgcatttacataagatgcgtaaatatgcagaaactcctttagcacaatgctgaggcaccaaccgtccatcatgatatgatgaaaggtccaaatgcaagagtactggctctctcctgtttgaatcagagcgatgcgcatgagcacatccttttgcaaatgaaacccccggtcccggtccttttctttccattgctcgataaactgtgattgctccgcctcgtttaaatgagtaatgtcttcttccagtacgatgacatttcgttctctcagaacaacctgctggggggaggaaacattttggctgataaaaatcgttctgaaaatatcatgtctttctacaagagcgttgatgctgttttgaaaaaactgcgggttgacttttccttctattgtaaaagaagcttgctcaacatacgcctgtgaatctttttgcaggagggaatggaaaagcatcccttcctgcatgtaagacagcggataaatatcctgaattgaattcgcttttgtcatgttcatgtctcctgtcacgattttctacaattcttccaccaagctggatatgctgtccaagtcctctgccgttaatgattgactgctgaaatcgctcagtgtcttttctgctttctgttgaccggcgcagtgtttcataatgtccagcaaaaagtgttcaatcctgttaataagctgttccattgtgtttctgtgaaagcgggctggcggataactaagattgaaatggagctttttgtctgctgccattgcactcatctcgatgatttgctcgcgcttccatgtatgagtgatatcctttccgctaccaaggcttgatgggcggaaggtgtcctgtctttcgatgtcgttgaactggcccaaatagttaaagctgatttcaggtgtttttgaaaacgtaatgcttttattttcagggtgtgtaaggtatttcagcataccgtaacctacccctttgtttggtatccggcccagtgtatctttaacggtttttactgaggttccgagctcatccctatgattttcaaagcttatgagggccgggtacatggatgtaaaccagccgaccgtcctgcttatatctaactctggcagaatgtgttctctcccgtgtccttccatagcgatacggagcttgcttcctcctgtccattcacaaatcgccaaggatgctgcggttaacagaatatcttgtgtatctgtgccataggcgtgattgacgttttgcagcaagacggcggtgtctgcttcagtcagtgaaaagcttaatgagtcccttttgctgaagtcgatgttcacatgatgcggtatttcatagggcagttctgcggcttgctgttcttctacacttcgccaatacgcctcttcgcgaatcagcttactgctttgggcatattcctgtatgcgtcttgcgtattcctggtaggaatccgttttaggcggaagctggatcgtctggcctgcagcagcttgttgatatccggctgacaaatcctccagcaaaatccgccatgagacaccatcaacgacaaggtgatggatcgcaaggaacaagtaatctccggtcagtgttttaaacaaagcggcgtgcaacaatggtccttcctgcaaattgatgctttgctgaagatcggcaacttcttgtttgattttcgtctcccagccgctttctgactgtgaaagatcagagattcttaagctgtatagctgtgactcatgaatgccttggttgatttgaatccatcgcctgtcatcgttgcgataaaccatccgaagcgcatcatgatgctccgccagttttttcaaggctggtctaagggcgttttcagacaaacgtccagaatggaatagcatgacagactgattgaaatggtgtctttcttcaatatcttgtgaaaaaaaccattgctgaacaggcgtccaaggaacgtcaccctgaatgggtccttgctctatgattctctctgacttacggataaatggtgataagtcctttatctttggatgacggaataaatcacttacctgcaagcttagtccatagcgcccaaggcgtgcagaaacttgaagggctttgattgaatctccgcccaattcaaaaaacgaatcctctattccgatcctctggatgcctagaacctcctgccagatcaatgccagctgctcttcaagttcgttgcgtggcgggatgtatgtttgtttagatgcgacatctggttcaggcagtgctttccggttcaatttgccgtttgatgtgagcggaagagtctccatttcaatgatatacgccgggatcatatagtttggcagcgaacgcgcgagaagagaacgcacttgttcagcattcgtgcctgcttttacgctgatatagccaaacagctctttgctcccggtctgggctgtacgtgctaacactgcggcttctttgaccccgtctatttgacgaagtgctgtttcgatttcacccagctccacccgatagcctctgacttttacttgatcatcaatacggccaacgtactcaattgtgccatcggaaagccagcgcgccagatcacctgtgcgatacagtcgatcgccaggtgcaaatggatgtgggacaaatttctctttcgttaaatcaggacggcccaaatatcctctggcgacgccatctccgccgacacaaagttcaccgacagctccgaccggctgcagcactccccattgatttaagataaaagcggtggaattaccaaccggccgcccgatcggaatggaaagttcatatgttttttgaatgtgaaggcatgtcgaaaaagttgtattttcggtagggccatatccattccatatagatacttcagggcagacatttctgattcgattgacgtggctcggcgacaaagcttctccgccaataatcaaatgtttcagctgtgaaaatgtttgttcattttgctctgtcaaatgattgaatagagaagatgtcagccaaatcgttgtgattccttgatgttctatgtacctcttaagctgatgggaatcgagaaatgtttgttgatcggacagatgcaaagcggcaccatttagcagcggtccgaaaatttcaaatgacccaacgtcgaaaccgattgatgatgtcatcagaaggcggtcttcaggtgtaaatgtaatataattgctgtttttaacaagacgaattacacttcgctgctcaatcatgacaccctttggtttaccggttgatccagaggtataaatgatatatgcaagtgaatggggccctgctgaagattcaacgttcttcgcctctccttgcttttgaatatcttcgattatgatttgttcacattcaatgcctaatagccgtttttctgttttttcagattgaaggagtaatgctgccctgctgtcagacagcatataagctatgcgttcaacaggcagattagaatcgataggcagataggctcccccggcttttagaatgcccagcattcctgcaatgagttctggtgttctgcctgtcaacaaggctacaacactatcaggccctacgccctttatctgtagaactgaggcaatttgatttgcccagctgttcaggtcctcgtaagtgaatacttgggtgtcgctgacaattgctacagcattaggtgtttgttctgcctgcatttcaaagagtctgctgatggtttcatttcttggataatctatttttgtacgattgagctcgtggataaggtaatgggcctcatcctcattcaggatatttattgttccgagagcggctttgttgtctttgatgatggagagtaacatattgttgaagtattgaagccacttttctatcgtttttttcttatataagtcagtactaaactccatttggaacgtcagcaaaccgcggggctgttcctgggcatatagggttaaatcaaatttggacgtttgatgcccattgtttgctgcaggtttgagacaaagttcatccagctccaacgattcctgatccatattttgaagaacaaacattacgtcaaacagcggatttctgctcatatctcgtgtcaattcaagcttatcaacaagctcttcgaacgggtaatcttggtgctcaaaggcttccattgctgtctcgcgcacttcctgcaagtactgtacaaacggcttcccgccctccgggcgcgtccgaagcgccagcgtgttcacaaacatgccgagtatcggctcaagatccttgtgcggccggccggcaattggcgagccgacgatgatatcttcctgtccgcttaagcgtgacaagaacgcggtgtaagctgcaaggagcaccatgtacagtgtgcttccgttttctcgtgccagcttgtaaaggcctgatgtaacctcttgatccagcgtaaatgagaccttgtcacccgcgaagcttcgcatcggcgggcgggcatgatcagccggaagatccagcacaggcagctcgccctcgagctgcttcagccagtacgccccctgcgttttgtacgcgtctcctgttttgaatccttcttgccatacggcataatctttatattgaatgcgcagtgccggaagcttccgattattgtacagttcgccgaattcccgaatcagaatgttgacggaaacaccgtctgaaatgatgtgatgcatatcaaccagcaacaggtgccgctcatctgatacctttacgatttgggcacggaacagcggcgcttggctgagatcaaacggtttgataaatgcggctgcggcctcctcttcggttcgtgcgccgagaactgtagtctgtaacgtaaacggcacctcgtcatggatgcgctgcaccgggtcgcctcctgcgtcctgttcgaaggcggtccgaagcgactcgtggcgcttgatcagctctttgaaagctctgtccatcctttcaaggttgagcttcccttcgagctctaacacagccggcatattgtagcctgtccctccgtcctccagctgctgaaggacataaatccgcttttgggcagaggaaaccggataggtttcctgtttttcagcgggcttaatcgcttcatatggactgtccgttccttcacggataacggtagccagtccttctaccgtcggatgggcaaacacatcttttagcggcacctgtacatcgaattctttggcgatccgtgagacaagcgccgttgcttttaaggaatgtcccccgcggtcaaaaaagttgtcgtgaatcccgacagggccatttttcagcacgtcctcccacagctgagaaagcttcatctcagtcacgtttctcggcgccgtgtaggtctccgcatctgccgctccgccaggagctggcagggcgtttcggtcgagctttccgcttggtgtaaccggccactgttccatttctatcatataggctgggaccatgtagcccggcaacagtctctgaagctgtgcacgcacttcgtttctttggagcccttctacataagcgcataattccggctcgccgctgtctgtccgtacggtaacggccgcctcccttacgccttctatgcttcttagtgccgcttcaatctctcccggctcaatccggtagccgcggattttcacctgatcatccgtgcgcccgaggaattcaacattcccgtcagggagccagcgcgccacatccccggttttgtacatgcgttcccccaggtaaaacgggtcttcaagaaaacgctcctccgttaatgccggccgattcaaataacctctggcaacacccgctccggcaatgtatagttcgccggcgacaccggaaggctgtacggctaaatgcggatctaaaacatacaaacgcgcaccaggtacgggcttcccaatcggaatccgcaaacggtctctgtcccgttctggatctaacacgtaaaatgccgcgtctaccgtggcttctgtcggcccgtagccatggattaatgatacctgcggcaatacagaagcaaaacgggctgccgtacgcggcgcaagcggttcacctccggcgaatacacgctttaggcttgtcctgtcactcagcctttcgatttccgcttgatcgagaaagctgttcagcatagccggaataaaatgagccgttgtcacgttttcctgatgaatggcttgtacgatcaatgcggagtctttttcccagccgggcggaagcagatacgccgaagcaccggaaagagcccaccaaaacagctgccacacagacgcatcaaaggaaaaagaggttttcaccatgacaatgtcatcttccgaaagccgaaactggtgctgcatgccggtcagaaaggaaacagcctggcggtgctcaacggccactcctttcggctgcccggtagagcccgatgtatagatgacataggcgagagatccgtcgctaacagaagcagacacatgacgttttacttcttcacactcaagagatgtcatgtccacttcaagcgtttcgccagaaaagtttggtgcggagcatcccggctgtgtcagcaagagcgatgccccgctgtctttcagcatgtagctcagccgctcctttggatacgcaggatcaagcggcaaatacgcccctccggccttcaatacagcaaggacagcgatcagcatgtcaggtgagcgttcagacaggacaccgacgatactttcgtttgtgacgccgcgtgccgcaaggtgcgcagccagccggctggcgtacatatcaagctcagcgtatgtcagcgaaccgcctgaaaagcgaatggccagccgctccggtgtgactgccgcctgtcgttcaaacagcccatgcagggttggggcttcaggtgaaacagatactgtcctgttattttgagaaacgattttccgtgttttgtcctcatctagcaacgtcatctttgacacaggaagagatggatcagagatgacgtcagagaccatgtgcagcaaataatcttttatttcggacatcatgcttggttgataagcgctggtctgaaaatgaatccgaacgtacaaggtacggcctgggatcactttgacactgcaactataattggtcacctcttccatctcaaaatctttgacggagaaatcaaatgaccccgcttgattcagctcttcgatctcttgctgggtaggtgtattttcaaagacgataatatgatcgatcaactcttgctttagagcactctgcgcctgaatatcatacaagggaaagtaactataggcttctgcctcattcatgtccttttgcattctcctgactaggtcagaaaaagacagagaatcactttgggctcgaataggaatggtattgataaaaagcccgaccatgttttccacatcttttagctcagaaggtctgcctgatataactgaaccgaacacagcatcgctgctgcgattgaccttttgaagcataatcccccataaagcttggaaaacagtgtttagtgtcgcaccagaagctgctgcgattttctgtaattcggcggtttctttttcgggaatggcaaacgtgatctgctgtagtgtcccattcggaatttgatctgttcttttcggcaggggtgtagatttttcgaaatgctgaagcctctttttccagtactcagctgcttcttcacgatcttgctgcatcagccatttaatatacgtcccgtacggctgtacgggaggcaaatcaggaagctggcctttacccagcgcttgataaatatggagaaagtctttaatgacgatgcctaaacaccagccatccattaaaatatgatggtggctccagatacagacataatgatcaggcgcccattttaaaatagatattctcatcagtacatccgtttggagatcaaagcctttggatttgtcctgctctttgaatgcctcggtacaatgttctttatccctttcattgagatgggaaatatcttcaatatgaatagggcaatgacgttgcttgagcacgacttgacgaggtttggctacatttttatagatgaatgctgttcgaaagatatcgtacctgtcaaaaacagcatccatacttttttggaaacgctccaagtcaagctgtccatggatcgtaaaagaagcctgttcaaaataagctctcgactgttcatcatacagtgagtgaaaaagcatcccttcctgcataaatgacaaagggtatatatcctgtatttcaggttgctgcggcatcagtgaatctcctctcctatagtttgttgacggctcccatgatctcactcaattcatcaagcgttaagtcttcatcagtgaaatcagatgcgctccactcttggttttctttgccggtacaatgctcaatgatgttttccagagtctgtttaaaatgcctggaaaatgtttggattgttttttcctcaaattgaaacctgttatagatgatgtgcatgttcaggcaccccgaagaaacggcgccgctgatatccagtgcataaggacgctcccagttcgggctgatctcatttcctggcttgatgtcagacacctcaaaggcatttgattgaatatcctgatcaaactggcctaaataattaaagctgatttctgggctgtttttctgagagccccatcttttgctgatatatttcagcacgccgtagcccgcgcctttatgcggtatacggtgcagcatatcttttgtctgtttaataaggtggcccagccgctcttctttgtccttatgatcggaatctctcatatcaagccacacaggataaatggaggtgaaccagccaacagttctgctaatatcgatgtcctcaagatatgattcccttccatggccctccatgctgattttaaattggttatttcccgtccatttctgcaaagcaagacctaaagctgtcagaaggatatcattcatctccgtgctgtaagctttatgtgcagccgttaatagtaattctgtgtgatggcgagatagctcaaaatcaatcacttctgtatctttgaatgtgttagatgctgcgtcattgtcttttggaataggctggatgtgacggttctcgcactcatcccagtacgctgcttcgcgctgcacctggcggcttatagagtagtcagctattctttgtgaatacgttaaatatgaatctgttttttgcggcagtttaatagattctcctgagactgcctgtttgtaagctgttgaaaaatcctcaaacaaaatgcgccaagaaaccgcatcaacaactaagtgatgaatcgttagaaataaatggtcaccattctcggttctaaacaatccagcgtgaagtaaggggccggtttccaaacgaatatgttcttgcatccggctggctgcttcctcaatcgtgttccgggcttctgttaggctatcctttacatcaaacagttcaagtgcatatagctcctcatctgaaagatctatccctctgtttatctgcacttgcctgccatcttcatgccggcatacgattctcagtgcatcatgatgagtcacaaggctttttagtacttttctaagcgcagcctcatcaaatcgttcagcccggtagatcataacggattggttaaaatgatggctttccagagattgcgagaaaaaccactgctggataggtgtccaagtaatctcgccttcgaccgggccttggtcaatggcgcgtacgtcttttcgaacccgggcggacagttcaccaagagtctgatgttcaaacatctcacgtactgtcgtttcaaatccgcgctgcttcagtctggcacaaacctgcagcgctttaatagagtctccgccaagcttaaagaaattggcgcttacacccagctcatctacattaagaagctcttcccaaatttcagccatcaccgtttcaatctcatttctaggactgatatcatcagctgtataagcttgtttttcaggctctggcagggctttctgatcgagctttccattaacagtcaccgggatgctgtcaatttgtatcatacgggcaggcagcataaagtcaggcaaggcgttttttaggtaagttcggatgtctgatatattcgcagcctgttgatcttttatcaccatatatgcatatatagctgtttgcccttgctcgtctgctctggtaatgacagccgcctctttaatcattggatactgaagaagtgccgcttggatttcgcctaactcaatacggtgccctctgactttcacctgctcatcaatgcggcctaagtattccagctcgccatttgacaggcgcttagcaagatctcctgttcggtataatctgtctcccggaagataaggattggatacaaaacggtcagcggtcagctcatctctgttgagatatccccgtgccacaccttcgccgcctatatacagctcccctggaactccggtcggctgcaggttcatatgggcatccatcacatgagcctgcagagtagaaagaggccggccgatattgcttttattttttgcaatgtctgctgcggacaattttttgaatgttacatggaccgttgtttctgtaataccgtacatattaatcaaatcagtatgaggatatttttcattccagctttgaagcaatccgggctgtaaggcttcgccgccaaaaatcacatagcggatgtttaaatgatctgtatgattttggtcttcaagcatcaagccgtaaaaagcagtcggggtctgattgagtacagtgacgcgctctttttttaacaataatcggaatgcttgggggtcacgggctgtttctttagagaccacgactaatgtacttccgttcaataacgcaccgaacatctcccatacagagaaatcaaagcaataagaatgaaataacgtccagacgtcttcatggttaaattcaaaaggcaggttttgatgcttcaagagactgatcacattgcggtgctcgacaatgactccctttggctgaccagtcgttccagatgtgtatatcacgtatgcgggctgatccgttactatttcttcaatgtttacatcagccggaattgagttgttttcacattcatcgatatacaaaatatgcccggtgtagtctgcaggtttgtttagaccgcgctctgtcagcagcagttttgctccgctgtcattgagcataaagctaatacgctccttgggatattcaggatcaatcggcaaataggccccgccagcttttaaaatcgataaaacgccaatgatcatatcaggtgaccgatcgagcatcagaccgacgatatcgccagttctgaccccttgtttgatcagcatagcagctgcccgctcggctttttcattcaggtctcgatacgtaagctgagaatggccgcacaccactgcgatatgctccggatactgagctacttgcttttcaaataagcttactatgttttcatttctcggataagctgcatactgccccattttttcaaggagtaacctacgctctgcagcaggaagcaattgcatgttcgaaattctcatctcagtatccgccgttaccccttttaccaattcaataaaataggatgcccactgcgtaatggtttcttcttcaaaaagagcagtgctgtattcaaaacggcagcgtattccactcagatgctcctcagcatgtaatgttaaatcgaatttagatatatcatgtttaggagtgacagacgaaatcgacagaccaggcacttcgaaccggaaatcttcactgctttgaagcacaagcatcgcatcgaacagcgggttgcgatttacctctcgatttgtatcgagcttatctgccagctcctcaaaaggataatcctgatgctcgtaagcggtcagagccaggtggcgaatgtcatgcaaataggagctgaacgttttgtggccctcgggcttgctgcgcatcgccaatgtattgacgaacattccgatgacgcgctccagatcagcgtgcggtcttccggcagcaggcgaaccgacaacaatatcctcttgcccgcttagcttagataacaaaatagaatagacagccagaagaatcatatacaatgttgttcccgtttcagccattaaacggtgcagttcatcagccatgtctttatcaatgttgacttcaattgttccacccctgaaatcagggagacgcggccttgttttatcaagcggtaattctagtgtaggaagactcccgccaagctgaccgagccagtaggcctcctgttttttgtatagctctttcgggtgcttctcttgctgccaaacagcaaaatccttataatgcaggtttaaagctggcaactcttttccgcaatataagtcagtaaattcttggacaagagtgctcatcgagacaccgtcggcaataatatggtgcatatcgagcagcaaaaagccgcgattattgcccattgtaatgacacatgctctaaaaagcggaccggatgatagataaaacggtttgataaaggtctcgattgcagactcaagcatttgttctgattccatttcaagctcttttagatcaaaagccatctctggataaatgatctgcacaggctcgtctctgtcaagcacaaaaacagtccgtaatgcttcatgccgattcacaagttctgtgagaacgcttctcaaccgctggcgattcagatttccgcgtaattcaagtacagctggcatgttgtagcctgtgctgtcatctgccagctgatgaagagcatataatcgtttttgcgagaaagacagcggatagacatctctttgatccgcaggttcaatctgtgtaaaagcgtgttcttttaagctcatcaatttgaccgccatgctttcaaccgtcggataagaaaacacctcactgagcggcagctcgacattaagctttttatgtattcttgataccagtgcggccgcttttaaggactgtccgcctaactgaaagaaatcatcacgaatgccgatgtgctgtttattcagcacatcttcccaaatatgtgcgagatcagcttcgattaaggttcggggcgccatatatgtgacactcgtattgttttctggttcaggaagcgcaaacctgtcaagcttgccgctggatgttaatggcatctggctgatgttgataatacttgctgggatcatataggacggcaatgtcccggcaagatgctgatacaaatctgggaggctgtttcccttttccggaacgatataagcaacgagctccttttcctcagcagaaacatcacgggccagtaccgctgcttcttttacccccggtgcttgtcgaagaactgtttcaatctctctcagttcaatacgataacccctaattttcacttgatcatcaaaacgtccaatatattcaatcgttccatcaggcaaaaagcggcctgcatcacctgttcggtataaacgctccccttcaaggaatggatgatcggagaatgctttctgtgtcagctcttgctgtttgtagtatcctctcgcaagacccgcgccggaaatacacagttcacccgccgcgccgatcggctgcatttgatttccgtgcaaaacaaatacttttgtgtttctgatcgggtgtccgatcgtgatcctctcttttttattcagatgccgcaatattgttgttgccacactgttttctgtgggcccgtattcatttgccagttcagcagaaggacaaattatttgattcaactcaagcagatcaggcgtgaccgcttcacccgcaaatgtcacaatacgaagactttttgcatcgtcagcagtcatcacttccaataacaccctgtacagggaaggaacaatgatcatgtggctgaccttataacgggctatttttcgcttaagggccagcacatccttcgcttcgtcatctgttgtcagcagtacgcacgcaccagataaaagcggggtaaataagctcgttacacagccgtcaaacacgtacgaaaacaaatggagggatatatcctgttcggtcatgctatactcttcccgtctccattgcaatgtattggcaataccgtgatgatcaactaaaacccctttagggcgccccgtcgttcccgacgtatagatcaagtaggctagatcacctggcggcatatttggcgcttctgtttggtaactttctgtatgttctatcgttatcgtatttccttcataggacggagggatcaaggaaataaggtcttcttctatcagcaattgagccgcttgactgtccttcagaagaaaagaaagacgttctgctggaaaatgtggatcaagcggcatataagcgccgcctgctttccaaatcccaagcagagctgcaggcatttccattgaccggcccatcattacagcaacgatatccccagatccaacgcctttttctatcagggcgtgcgcaatctgattggctcttacttgtaactggcgataggtccagcactcgtttcccattttcaatgcagcagcttcaggtgttttgtgagcttgttcctcaaacaattggggtatcgttttgttcacataaggacgctcagtttcgttaaacaattggataacctgttgctcctccggcggcacgatattgatgtcactgacggcaacatcgggatttgtcaaaatgcaatccagtgcttgctttagatgcccctgaatcctcagcatctcctcccgctcgtaaacgtctgcgttgtagctgaatttgatataaaatgattctcccggaacgataacgatattaaagtcgtaattggtttgttccgacattgaaatgtcactcagcttcagagcgccttcgtcattttcactctccacgcttaatgcctgatgaagctgtacagggtaattttcaaaaacaaaaatatgatcgatcaacccttgcttcaatggactatggttttgaatctcataaagcggataatacccatgctgttcagatgataaaatatcctcctgcacggctttgaccagcgaagaaaatgttatgccttccgcagatcggattcgcactggaacagtattgataaacaaaccgaccattgattcaatcccgtcaatcgctgacgggcgtcccgaaatgacggagccaaaaacggcatcatctgcagcattatatcgatggagcagcacgccccaaatactcataaacagcgtgtttaatgtcactccccagttttgggcagcctctgtcagtttctcaaccatatccggcgctaatgaaaagctgacctggtcggctttataattcccgtctgccgtgcggcgctttattcggggaatagaagcagtattgccgtactccttcaaatattcgctccagtaggcagcagtctcttcttgatcttgttctccgagccattcaatataacggctgtacggcaccgtgctgccaagctgtacaggtgagttatttttgagcgaatcatacatgctgaaaaactctttaagaataatgccgagacaccacccatccatgatgatatggtgatgtgtccagacacatgtatattggctgtctcctctatcaaaaagggcaagacgcattaaaggatctttttgcaaatcaaatcctttttcccgatccttagtcataaaagcatcaatcagcgtctgctgttcttgatcagccaggcgagaaatatcttctctatatactgtcaattcacggtttgatagaactacctgctgcggacctgtaagatctggtacttctttaatgaaaatcgttctgaaaatatcatatctagaaacaagaaggtttaagctcttttgaaacgagtcgacgcatagattccctgtgatcgtaaacgaggtctgttcgatatatgctttcgagctgaaatccattagtgaatgaaacagcattccttcctgcatgtgcgataacggataaatatcttgaatttgtgccgattgtgccatcaattccacacaccttttcaaaagttaaagatctttcacgagatcttcgatgctagataatgcagacaacgttaattctttattgctgaaatcgctcaatgttttttcgcgtgcttttttctgcgaacaatgctcaatcgtctcgataagatgcctgtgaaaacgatccataaagcactcaattgagtgtttgctgaacacttgggtgtataccgcttttacgtgaagccgtccgtccgtaatgagagcattgatgtccagctcatactctcgttctctctcacccgctatttcgtaacggggctggtaatatgataattgaaacgtttcaacttccttctcttcgctaaattgaccgagataattaaagctgacctcaggctctttatgccgcagttctcctatgtgtgttaacaatccgtatccagttcctttgttcggtactcttctcagcatatcttttgtcgtcttaattcggtatgcgagctgatcctcgaaaggctcgggaatacccatgtctagcagaataggataaatggaggtaaaccatccaactgtccttgaaatatcaatgtttggcacatgcccttctctaccgtgtccctcagtgctgatcacgatttggtcatgcccagtccattcagaaagcgccattcctaaagccgtaagcaaaagttcgttggcatcagtaccataggcttgctgggtttcaaacagcaatttttcagtccagtccccggatagtacaaacgctgctgcgtcgctgttcatttggagtttgtctggcacattttctatgtccttaggaagaaaagcagtgtgagcgtctaaaatcgtttgccaatacgttttctctgaaagcaattgtttactttcagctatttgggtaagaccatcggcgtaggataaataagaatccgtttttggcggtaattggatttctttcttttctaaagcctgttgatatgctgcagctaaatcctcaagcagaattctccaagaaacgccatctatcacaagatgatgaagtgcaatcagcaaatgatccccttctgccgttttaaacaaacctgcttgcagtaagggccctttttctacattcattttgctttgaatgacggtttcctcagcggcaagtttttcatcaagatgagccctttccagcgatgcttttgtccaatctgaaatataaaggccaaacagttcatgatccttgtgattgattccgcgattaaactgaatgacatggccgttttggtcacgttggaaaatcatgcgaatggcatcatgatgctcggttattttacgcagcgctagatgaagcgcgttagcattgaatcctttttcactgaaaagcatgacggactggttgtaatgatagtgaaaagcatgtacctgtccgaaaaatcttcgctgaatcggggtgagttcagcttcaccttccgcaggtccctggtccgcttgagatgccaatggtgtgatatgtccgcatagttcctgaatcgttgaataacggaataagtcgcgtattgtcatgctccagccttcagctgccagacgtgctgccacttgtaatgctttaattgagtctccgccaagctcaaaaaaggaatcgtgaatgccgactcgtgacatgctcagtacatcttcccatatatacgccatcgttttttgtaagtcgttaactggtgcggtatatggacgcgataacacattatttggagccggcaaggcatttctgtccagctttccgtttagggtcagcggcatgtttactaaaggaatcagatatgcaggaatcatatacgctggcagttcctttgttaaagcagcacggagagcattcgtattgacgtctgaaggcacaatatatgctgccaaaccagcctgtccatttttatcatgctgaacggcaacagcagcttctctgacaagccccgtttgaagcagaacactttcaatttcttctgtttcaattctgtatccatttatctttacttgataatccattcggccaagaagccggatcgttccgtttggaagccagcatgctcgatcaccggttctgtacagcctttctccagagacaaatggattttctgtaaatttcatttgcgttaagtcaggtttatgatgatagcctttcgcaacacctgccccgccgatgcacagctcgccggcaacaccgatcggctgaatttgatcagtctggctgagtacgtacatgtgtacattcggcagcgggctgccgattggtacgttatctcccgtacactctccacccatactggtttcatagaaactcgaatcaatggttgcctctgtgacaccatagctattaatgatgcgcatgctttggccaaagcgatctgtcaatgttttgaaatcttgagctttcaccatgtcggaaccaagaatcagtatgtctaagtcaggaagcttgaactggttacggtatacatactccatcaccgggataatgagagccggtgtcgactccatcaccgtgattctctgagatttaatgattttatatatttcagcaggttccagccgtgtttcatctgggcaaacgattagagtcccgccgttggtcaatgttctcgccaaatctcctgagaagacatcgaatgaaaagctcgcgatttgaagcagtctgacaggcttccgatccagttcataaatttgacgccaagcaagagcagcatgagtaaagttctgataggtgacaataacacctttaggcgcacccgtcgttcctgacgtataaatgatatataccggctcttcaggagcaggagataagttaaggttgcagttactttcttcaaaagagccctcatcgtcaaggaagatgtgagacatctcagattcaggcgagttcgaaatcaaatgcttcaactctctctgtaaaagaagaatatctgccccgctatcacgaagaatgtattcaatacgagcttttggataatgtgcatcgattgggatatacactccgccagctttcatcactgccagaactccaacaattgcatcgatggaccgcttggctaaaacagccacagttggcttcggtccttttctgttttgcaatgttcgtgccagacgattggctctttcatttagaaggcgatagctaatctctgtttcgttatcaataacagctatatgttctggattttcttcagctttcgcttcaaatatgcgatgaaaaggaatatctttttgagcaaattcaacttgagttttgttaaattcaaagactattttttgtttttctttatcactaagtatgtttatttgtgcaaggcttgtttcaggagttgaaagtgcctcatgcagaaattcgataaaatgatcagcccagcgttcaatcgtagctttcaggaatacttctgtactaaattccatttcgcagcaaatagatccacttatttccgtagctattaatgtgatatcaaataaggaaatgtgatgtgcgaaattggcaggccggacttttatttctctcagatctatgtcttgtttttccacattttgaaggataaacatcgcatcaaacactgggttccggctcatatctcgtgtcaattcaagcttatcgacaagctcttcgaacgggtaatcctggtgctcaaaggcttccaatgctgtctcacgcacttcctgcaaatactgtacgaatggcttcccgccctccgggcgcgtccgaagcgccagcgtgttcacaaacatgccgagtatcggctcaagatccttgtgcggccggccggcaattggcgagccgacgatgatatcttcctgtccgcttaagcgtgacaagaacgcggtgtaagccgcaagaagcaccatgtacagtgtgcttccgttttcacgtgccagcttgtgaaggcctgatgcaacctcttgatccagcgtaaatgagaccttgtcacccgcgaagcttcgcaccggcgggcgggcatgatcagccggaagatccagcacaggcagctcgccctcgagctgcttcagccagtacgcctcttgcgttttgtacgcgtctcctgttttgaatccttctcgccatacggcataatctttatattgaatgcgcagtgccggaagattccgattattgtacagctcgccgaattcccgaatcagaatgttgacggaaacaccgtctgaaatgatgtgatgcatatcaaccagcaacaggtgccgctcatctgatatctttacgatttgggcacggaacagcggcgcttggctgagatcaaacggtttgataaatgcggctgcggcctcctgttcggttcgttcgccgagaactgtagtctgtaacgtaaacggcacctcgtcatggatgcgctgcaccggatcgcctcctgcgtcctgttcgaaggaggtccgaagcgactcgtggcgcttgatcagctctttgaaagctctctccatcctttcagggttgagcttcccttcgagctctaacacagccggcatattgtagcctgtccctccgtcctccagctgctgaaggacataaatccgcttttgggcagaggaaaccggataggtttcctgtttttcagcgggcttaatcgcttcatatggactgtccgttccttcacggataacggtagccagtccttctactgtcggatgggcaaacacatcttttagcggcacctgtacatcgaattctttggcgatccgtgagacaagcgccgttgcttttaaggaatgtcccccgcggtcaaaaaagttgtcgtgaatcccgacagggccatttttcagcacgtcctcccacagctgagaaagcttcatctcagtcacgtttctcggcgccgtgtaggtctccgcatctgccgctccgccaggagctggcagggcgtttcggtcgagctttccgcttggcgtaaccggccactgttccatctctatcatataggctgggaccatgtagcccggcaacagtctctcaagctgtgcacgcacttcgtttctttggagcccttctacataagcgcataattccggctccccgctgtctgtccgtacggtaacagccgcctctcttacgccttctatgcttcttagtgccgcttcaatttctcccggctcaatccggtagccgcggatttttacctgatcatccgtgcgcccgaggaattcaacattcccgtcagggagccagcgcgccacatccccggttttgtacatgcgttcccccgggtaaaacgggtcttcaagaaaacgctcctccgttaatgccggccgattcaaataacctctggcaacacccgctccggcaatgtacagttcgccggcgacaccggaaggctgtacggctaaatgcggatctaaaacatacaaacgcgcaccaggtacgggcttcccaatcggaatccgcaaacgatccctgtcccgttctggatccaatacgtaaaatgccgcgtctaccgttgcttctgtcggcccgtaaccatggattaatgatacctgcggcaatacagaagcaaaacgggctgccgtacgcggcgcaagcggttcacctccggcgaatacacgctttaggcttgtcctgtcactcagcctttcgatttccgcttgatcgagaaagctgttcagcatagccggaataaaatgagccgttgtcacgttttcctgatgaatggcttgtacgatcaatgcggagtctttctcccagccgggcggaagcagatacgccgaagcaccggaaagcgaccaccaaaacagctgccacacagacgcatcaaaggaaaaagaggttttcaccatgacaatgtcatcttccgaaagcggaaactggtgctgcatgccggtcagaaaggaaacagcctgacggtgctcaacggccactcctttcggctgcccggtagagcccgatgtatagatgacataggcgagagatccgccgtcagcaggagtaaactcatggttttctgctttttcgctcgcaagagatgtcatgtccacttcaagcgtttcgccagaaaagtttggtgcggagcatcccggctgtgtcagcaagagcgatgccccgctgtctttcagcatgtagctcagccgctcctttggatacgcaggatcaagcggcaaatacgccccgccggccttcaatacagcaaggacagcgatcagcatgtcaggtgagcgttcagacaggacaccgacgatactttcgtttgtgacgccgcgtgccgcaaggtgcgcagccagccggctggcgtacatatcaagctcagcgtatgtcagcgaaccgcctgaaaagcgaatggccagccgctccggtgtgaaagctgcctgtcgctcaaacagcccatgcagggtgaaagctttaggcgaaacagcttccgtcttgttaaactcatacaacaatttttgcttttctcttgtattcgtcatatctaattctcttataaagctgtgcggatgtttaagggcgttttccagtatggtaagcagatgagattgtattcgtttaatatcctcaagagaaaacaaggtattttgatagtcgaaatttaattgaatggttccattgtctatccgttcttgtatttgaactgaaagttcgttcgcggtgtatccgctgaaataaagcgctgtttcatagtcaaaatcatctgcattgtgccactgaagtggctgatactgcatagatataccgataaggttgtgtaaatccttctgttcatttcttaattcatttacaagcaaattataaggaaaccgttgatgacgcataacagaaagctgttccctgcctattgtgcggacaaaggaaagaaaatctgtgtcaggatcaaccgttattctgattggaagggaactaacgaacatgccgagcatttctttttcagcctttgaacctctgttgccatagtaggtgccaatggcaagatcttttttagaagtgattcggctgatgcatatgtaaaatgaagccataaataaggaaatgatattgatcttgtgttcttcgcagaagattcgaatcgtttgctctagatcaggtgaaagaatgatggtgtctctggatgcagatgtgctctgtttttgtaaggacgtctggtcggctaacgagtggtattccaacgggtgctcaaaggtttgcgtccaaaataaacggtcctttgcaaaccgtggagattgtagatattgactctctttttcgatgtagctcaagtaagaaggttccggctgatcaggtaaaggatctttctttttcattttttgataaagatctataatttgatttcccatcacatttaaagagattccatccattatgatatgatggaatttcgcaaatagccaaacttcatgagagtcaattctaaggaggtaaaattgaaaaagaggcgagttgaacagtttaaatggaatgctcgcttgatcctgaatccattgctctatttctatcatttcaacatttgaaaaatcaattattctaagtggataatatttatattcagtaaggtgcaatcgaggctcaagctcttctccttctaacagctgaaatctaatggcgtcgttgcgggagatggaatgattcagtgctccctccagagtatcaagctcaatattgcctttaaatttcacacaagctgtaagattgcaaatgctggtatctggctccagcagttcggtaaaccacactctcctttgggcatgggttaaagaataagtatgttcgctcaacggattccctccagttctcataataagaggataagaaaatgtagaaaaaagcagaaaaatgacaataaaagaaattatatgactatataatccatatatgcactatattaacggatattttttaaagtacaataaaaaacattaaatttttataacattttttttgaatatagtattatttctttatttttcgtttctttttttatcaaatttccggatataaagtgataaaagtattgttttacataaggtcttatacactactttttaatcggactaattttcttttgtgcatcattcttctaattgttggaaggttcgacaaagcgttattacagacataaaaaaacctgttttctcttggaaaacaggtctcccgctattattgatttgccaaaatgacagcgatttgatcctcaatatcttttccatcctcttcatcaatcaatccatttagaagaatagagaaaacaagtttttttccgctctttgtttctgcgtaccccgatagagagcttaccgtactgagcgatccggtttttgctcttacttttccttgtgcaggagtgcctttcatgcggtttctcagcgttccgcccaccattctgtcaggattccccgcaacaggtaaagaatttagataagccgagaaccaactctgatcctgaatgtcatataacagctgtgaaagttgatctgaggatacagcatcaatatgtgagattcctgatccgtcccttaagacgagtgatttagaatcaacaccaaattccggaagcgtactgtttaacacttcgagccccttttcccagctcccttctccttttttcactttccccatctcttttacgagcacttcggcatgtccgttattacttaatttcatgaacggcacaaaaagtttcgataaaggcattgagcgatgagagagcagcacatctgaagaactaggtgcttcacccgtcttgatgtcccctttcacagtaataccttgtttttttagtgactgcttaaataaatctaaggcatatccggcaggctcccagacagaaatccattcctttgtcttgtttgcgtcaaccggtacgctcccttcaattgtaatcgtgtttgttccatgctctctttcgattgtgaggtctttctctgaaccggcagcagtcgttttagcatcgttctttatcgttatataatcggttttcggagagacagacacggcaggctcttccccttctttttgatttggggtgacctcaacaatcacagtgcctgcatcatagtcttcgtttggagacgctgttagagcggagattggcgcgccataatatgtgtattcatcgctccaaggcatatcaggtgataatcgcatgtcatcatgccacgtatcatcaccgatcagattgcctttaattacttttacgccggaatgtttcaatatctcagccattttgtcaaaatcagatggtaaaagtgtcggatcgcctttccctttcaaataaaggttaccattcagctttttccctttcagtgttccatccgtccggacctcggttgtaaaagaatagttctcgccaaggacagaaagtgccgcggccgctgtcaaaagctttagagaagaggcaggcctcattcgggtgtctcctgaatgttcatatagaacagcacctgtttccgcagagcgaacggtgatgccggccattgcgccttcgagggcaggatgatcagctaaaatcttatcgatctgcccggaaagtgcatcttgtttttcagcggcaagcgcagcctgatgcatataaggcaccgaagcaacgacgaaaagcagtaaaacagcaacataaagctttatgctttttttcattaatttccccgcctctctgcgcttcatcattggctattgatgattcagttcaatggtgatactgcttttagctgtcgtttcttctcccggctccagcacttgtaaaccagtgagtgacgaaggtaaatcaagattcactgcgtttgtcacccatgtgtaaggctcagggcataaatacccttgttttccgtccgcattgtatacaacccaatgtttaaactgttcatctgccttataaataatgctgatatgtgcatgctgatgataaatgactgcctggttttctccgcccctcttctgataagaagataaaaagacatcatccagctgcttgtggcgcaaatccattccttcatgcaaagcttctttatacgggacatccatcagcttcccggtcggcagcaggcgttcatccaactcccattgctgatctgctgtcagggagaataacgagctttctgccggaaatataaatgtagtatgataaccaattccccaaggaaacgcttcctttcctttgttcatgaccgtcgcatgtttaaatagggtattctccttgatcgtgtatgtcatccgaacgacggcatgatgaggaaattgcttctgcacatggggaagctcagaaagatcaatttctgtttcaacaatcactccttcatcagtttgcttcgtggtcacgacattccacttttcatggtaaagaaacccgtgaagatggttgtgtttatccttctcgttgatatcaaaatgatacgttctgccccggaaactgaatgtaccgtcacttatgcggttaggcgggaacaggattggaatgccatacaatgttggtgtgtcgtgaaaactttctgctgtttccggttcacgcaaaagctggacatttgttgttttgtccacgagagaaatgacgttgctcccccactcagggacaacaatcatttctagatgttcgttgcccgctttgatggccggcgttcccaaatacgtgattttctcaataaagtttgccatgtttactcaacctctccttgattcattgctagtataagaattcaatgtactgtaccatatttcctccattttatattttcccctatcaaataaaaaaacaccgttcaaacttatgaacggtgtgattcggaggctattggatgagacgtgtgatttgtttctttttccagacgaattgataatacccataaatcaacagcaagctgacggcaaacgcagctggataaccaacccagacgccgagtatttcaagctttgtatagtgagaaaggacgaaagcgacaggcacctctactccccagattgcaaaaatactgatgacggtcggccataaaactgttccgcttgcccgcatcgttgcagaaataatttgggcatttccaaacagcaaatagctccacagtgtaatcatcaaaagacggtgcgcaatgtaaagcgtctcttgctcggttaaaaataacgataaaatctgatgtgaaaaaacatagatcagaatgatcagtacgccgccaatgatataattcagccaaatcccaacgcgaatgacctgctttaagcggtcaaactcgtttgctccgatcgattgcgcagcgaaaatagaaaccgcaataccaaggctgacggccggcatctgtacatagctggccacctggttgaccactccgtatgcagctgttgcattagagccgtaatgattgacgaatgaaataaccgctatctctgataatgagacaagaatcatattgatgcttgctgggaccccaagacgcagcaggagaaccagcagttccttatccattttcaaataacgacgcactgttttatcaaattgcagcgggtgttttcgctttcgtaaatacaccattaacacgagaaaagtcgcaatcgtggaaatgacagttgcatatgccgagccgtatatgcccagtttcggaaaaccaaacatgccaaggattaaaacaggcaaaagcgcgatgttgatgaccgtgctcacaatcagcgtataaaacggtgtcttggaatctcctgttccgcgcaaaaaggtagtatatgcaaaatataaaaacataaacggcatagcataaaataaaatacgtgcatagttagcgctgacatgaatgacattttcaggtgttcccattaaacgaaggatatccagggtgaaaatactgccgataacggctaacacaacgcctaataaaaatgtaaacgtgagtgtcgtcccgacaacagcctttagccgttcctcatttttcgctccgtaagcttgtcctatcagaatcgaacttcctgaaccgatcccaatcgtaaatgagattaaaagaaaaaataacgggaaaaaggatgatacagctgccactgcatcaacaccgagccatctgcctacagccatcatcccgactagctggccgactgattgcagcacattgctcagcagaagcggcactaaaaagagtgacatcgaccgccaaactgatggtttgcttttcttttgagttacaagaggttcttgtgatgtttccatattaaaggactcctttatttgaaatcgtttttaaacatgccctcattttttgacaaaaacaggatatgtaacatgttattattcatcactgcacttatgaaacccttcccgattcttctaattttacacatctttttagcttatgaagaataaactagcaagtaatggcgtattttttgtgagtaaaagaataaaaaataatttatgcaaaagtattgtaatctatccgtaattattgtaacatttgtaacataagagaaagagattttgaaggagagagcgataatgaaaaaatgtcttctatttctaacaaccattgcacttattctgtcattaagcacaaatgcatttgcgaaaaatacatcaggcgatttatcacaaaaacaagcattacagttggcattatccgctagagaacatttttggaacaccatgagcggccacaatccgaaggtgaaaaaagcagtttgcccatcaggcacattcgagtatcaaaatcttcaatatgtatacatgtgcagtgatctaggcactaaagcaaaagcggtgaattatttaactcctatttttacaaaaacagcaatcgaaaaaggctttaaagattatcatttcactgtttcaaaaggaaaacttgctgttccaatcggtgacggagacaatcttttgaattggaaaaaatcaactgctaaactgatctctaaaaaaggcagcacaatcacatacgaatttactgtccctacattagacggatccccttctgcaaaacggaaagtgacatttgtgaaagaaaataaaaaatggaaagtcaatcaatttgacgcagttatataagaaaaacgcccggtataagcgggcgttttttatttggtttgcataaagaaagacaacaggcgaaaagtgcctgttgtctttttgtgaatataacgctctaggagagattcgaactcccgacctgcagtttaggaaactgctgcactatccgctgtgctactagagcttttggtatttatatagtagctctgatgatcaatattttcaagcgatttgtattaaagccctccaaaaaccttatatgcggctcttgtcgtatcttcatcaataccgatataccgcattgtaattgatggtgatgaatgattcagtattctctgcagctcggcgatgtctttcgttcgctgataaaaatgatagccaaacgttttccggagtgtatgcgtccctatctcctcaagtccgcacgctgcagcggcctctcttaaaattctgtaggcctgaatgcgggaaatcggcttcctggtccgcactgatttaaaaagatattcgttttccttcatgtctttcgtatactcgtatatttcctgtttcagcgattctaaaataagaatctttcttttctttttcgttttgctttcagtcgcccataaatgatctttattttgaacgtccttcacttgcagcggcagaatatcagaaatacggagcgcgctgttgatgccgaaaataaacagaaaataatcccgcttgtttttgttaagcaaatactgtttgacttcttggattttctctagactgcgaatcggctgtacaatatgcatcaaaaaactccttaaaaaccgttatgtaacattttgaggtctatgttactattatagctgaaaaacgttgaatgtcaaagtgcggcggcgtttatgtaacataatatacatagtgttacataagcttttaaaaaagcttcttccaaccttcaccctataaaataagctttaaagcctcttataaagcttttaacctcttggatacttatccccctactaatcatcaaaaaacctcttaaaatgaaatctgacactcccaattttctggagcttccgcaaaaatatacaaaaaaagacacaatttcaaattgtgtcctaatcctcatcctttacatcaatatcttccgggatcggttcatttaatatttcctgcacaagtgctttgtaattctccagctgttcgagatgcgttttgaactgttccttataaatcaaaaattgctccccgtcatgaacggctctgattttcccttcgagcaccaagcttttaatataatcctctgaaagatttgtatattctgctgtttcttcaatcgttaaatacatatagcagtcccttcttaatccgtatgctgattctaatatagcacatggctcatatcaatataatcaattctgcacagaaaaacggcattatgcactatataatataccatttgtcacttgtgaaaacgctgtaatttttttacgctaagattgtaacaatacagcttcatataggagggagaacatgaaaagaacgtggaacgtctgtttaacagctctgcttagtgttctgttagtcgctggaagtgtcccttttcacgcggaagctaaaaaaccgcccaaaagctacgatgagtacaaacaagtagatgttggaaaagacggcatggttgcgaccgcacatcctcttgcttctgaaatcggtgctgatgtgctgaaaaaaggaggaaatgctattgacgcagcggttgccattcaatttgcactcaatgtaacagagccgatgatgtcaggtattggcggcggcggttttatgatggtgtatgacggaaaaacgaaggatacaacgataatcgacagccgtgagcgtgctccagcaggcgcaactcctgatatgtttctggacgaaaacggcaaagcaattcctttctctgaacgtgtaacaaaaggtactgccgttggtgttccaggcactctgaaagggctggaagaagccttggataaatggggaacccgttcgatgaagcaattaattaccccttctattaaactcgctgaaaaaggctttccgattgattcggtgttggcagaggccatttctgattatcaggaaaagctttcacggactgccgcaaaagatgtatttttaccaaatggcgaaccgcttaaagaaggagatacccttattcaaaaggatttggctaaaacatttaagcttattcgctccaaaggcactgacgctttttataaaggaaaattcgccaagacgctttctgacactgtccaggatttcggcggatcaatgacagaaaaagatttagaaaattacgacattacaattgatgaaccgatttggggagattatcaaggctatcaaatcgctactactcctcctccaagctccggcggtattttcttattgcaaatgctgaaaatccttgatcattttaacctttcacaatacgatgtccgctcatgggaaaaatatcagctgcttgctgaaacgatgcatttgtcatatgccgaccgtgcgtcttacgcaggtgatcccgaatttgtaaatgttcctctcaaaggcctgcttcaccccgattatattaaagaacgccagcaattaatcaacctagatcaagtgaataaaaaaccgaaagccggtgacccttggaaataccaagaaggatcagcaaactataaacaagttgaacagccgaaagacaaagtagaaggccaaacaacccactttacagttgctgaccgttggggaaatgttgtttcttatacaacaacaatcgaacagctattcggaacgggtattatggtccctgattacggtgttattttaaacaatgaattaacggattttgatgcgataccaggcggagctaacgaagtacagccaaacaaacggcctttaagcagcatgaccccgacgattttatttaaggatgacaagcctgtcctcacggttggatctcctggcggggccacaattatttcatccgttttgcaaaccattctctaccacattgaatatggtatggaattaaaagcagctgttgaagagccgagaatttacacaaacagcatgagctcttaccgttacgaagacggagttcctaaagatgtcctcagcaagctaaacggcatgggccacaaattcggcacaagtccggtggatatcggaaacgtgcaaagtatatcgatcgaccatgaaaacggcacctttaaaggtgtagctgattcaagcagaaacggcgcggcgatcggcattaatttaaaacgtaaataaataaaaaactgtactcgcttcaaatgagtacagttttttcatgcagatctttaaaataaaaactgacaaacgtctttattctgctaatgcacgtctatcttcatcttttcatttcgtttatctcatcaagaaatgtctgaaacgcactcgtaataaaaaagtctttcctgtatataaagacgatctctaagtcttgatatgatggtggcagctgatgaatccatacatttgtacgatgctcggagccgtcaacagcggactttgggagcagcgccgtacccatcccggcggaaacaccttttataatagcctccaatgtgccaaactctatgattttttgattgtgtatgcctgcttcctctagtaatcttttgaccctgtcacgatgagaacagccagccccaaaaaagagcatcggctgctgaagcatgtcttctgccgtcccttctcgtgatgaaatcaaaactaattcatcatgggagacatggagttgtctaactgcagcgtgttcaaccggcccatatacaaaagcgccatcaactttatgatcaagaacctgttgaatcaaatgatgcgtatcagctgtgttcactgataaatccacttcaggaaaacgcctgaggaaggatgctgcatgctcaggcagatgcgttaccgccattgtttccagtgatccgatccgcaaaggcccttttggttgcctgctcattcgggtcgatttttcagcttggtctaacagcgataatacttgatctgcatattgtaaaagattttctcctgcagcagtcagcttcattccccgattcgttcgatgaaaaagcctgatattcaaatcttcctcaaggttatgcactctggctgtcacattcgactgaacataattcagcatttgggctgctttcgttatgcttccttcgcgagcaacagcctgaaaaatctttaaatctccgctttccacgcgctctcacctgcttgctatgatgaaaagtgatattggctatcatatttgttcattttactcgaagaaaaccgctatgtaaaatatgtaaagatatgaaaatacaattaatgaggaggcagacagcatgaaagctgtaattcacaacggaaaagccggtcttctggggttatcagttcaggacgttccatcaacaaagcctggatacggagaggtaaaggttaaattaaaatctgcaggcctgaatcatcgtgacttgtttcttatgaaaaacaaatctgaacaagatcctcacatgatactgggttctgacggcgcgggtatcatcgaagagattggtgaaggcgtgaaaaatgttactgttcagacagaagtagtcattttcccgacattgaactgggatttgacagaaaatgttccacctgtacctgagattctgggaggtccttcggacggaacacttgctgaatatgtgatcattccttcacaaaatgcaatcaaaaaacctgcttatttatcttgggaagaagcgggcgttttacctttatccgctttaactgcatatcgggctctgtttacaaaggggcaattaaaaaaaggcgagcatctattgatacccggcatcggcagcggtgtagcaacctacgctttatttatggctaaggcgattggggcaacagtaagcgtgacctcccgcagtgaggagaaaagaaaaaaggcgctgaaattaggtgctgattacgcatttgacagctacagcaattgggatgagcagttgcagggaaaaaagatagatgttgttcttgacagcataggacctgccctcttttcggaatacttccgccatgtaaaaccaaatggccgtattgtcagctttggggcaagctcaggggataatctcagttttccggtgcgttctttattctttcctcaggtcaatgttttgggaacctcgatgggaagcggtgaggaatttcaagctatgctcgctttcattgacaaacataagctgcggcctgtaattgaccggatatatcctttagaaaaagcatgtgaagcatataaaagaatgcaggaaggcagacagtttggaaacatcgggatcgtaatggaataaaaaaagaaaccggctggcagccagaccggtttctcttatatgataatcccctttatttacggaagaactgaactccccatcaaatatcgatccacttcacgcgccacttcacggccttcattaatcgcccatacgattaagctttgccctcttcttgcatcccctgcggcgaatacaccatcgatatttgtttgataatccccatatgctgcactgattttgttatttactgaattaacaccgaactgtttcaacagcggctgttctgtgccttcaaagccgatagcgataaagacaagctgagcaggccatactttttccgttccaggcagctcgcggaactcgtattttccatgctcatttttcactttttccatttggatggtatgaagctctttcagctttccgtttttatccgcgaccatttttgtcgtttgaatggagtattctctcggatctcttccgaattttgcttctgcttcctcgtatgcatattcaagcgtaaagacgtgtggctgttcaggccacatattgtcattcgtgcgggctggcggaagtttcgggtgtttgccgaattggtgcacgcttttggctttttgacgcagagcggtagccacacagtcagctcctgtatctccgcctccgattacgatgacatctttccctttggcatcaatgaattgcttgtctttaaaattagaatctaaatagctttttgttgcaagtgtgaggtagtccattgcgtaatggactccttttgagtcgcgtccttcgattaagaggtcccgctgtttttgagcgcctgtgcataagatcacagcatcaaattgctcctttagctcatcagctgtaatgtcaacaccgatttctgtgttcgtgacaaaatcaattccctcttgcgtcagcaatttaattcggcgttctacaatgcccttctcaagcttcatgtttggaatgccgtatgttaaaaggccgcccgctctgtctgctcgttcaaaaacagtgacggaatgtcccgcttgattcagctggtcagcactcgccagtccggctgggcctgacccgacgatggccacttttttgcctgttcgtttttttggaattctaggttgaatccagccgttctcaaatcctttatcgataatggtccgctcgatgtttttaattgatacggccggatctgaaatcgctaaagtgcatgatccttcacaaggagcggggcatacccgccctgtgaattcaggaaagttgtttgttttcaacagacgttccaatgcttccttccatctgccccggtagacaagatcattccattcaggaattaagttgtaaatcggacagccggatgtaaatccgttaatgtccgcaccgatctggcaaaacggtgtaccgcaatccatacaccgcgccccttgccgtttcgatgcttcttctgaaaaaggagcagaatattctttccaatcctttaagcgagtgagagggtcccgctccgcaggtttttctcgtttgatctccataaatccagttggtttccccatgttcctctccccttccttactgtactaccgcttgtttttgtcccgatgctgctgtattctgctttggcttcgtgttggcctcaaaagcgaacatgatggcttcttcatctgataaacctgcagctttttgctcttcgatgcttgcgagcatttgtttatagtttttcggaatgactttgacgaattttttcacactgtcttcccattgatctagcagatcttctgctttttggctgtttgtatacgcagtatgtctttcaagcattgctttgatttgctggatttctttctcatcctctaatgattcaaataaaatcatctcaaggttgcatttgcgtttaaacgctttgacatcttcggtcagtacataagcgattccgccggacatacctgccgcaaagtttttgcctacatcaccgagaacgacaacgctgccgccagtcatgtattcacagccgtggtcgccgatgccttctacaactacgttcacaccgctgtttcgaacggcaaagcgttcaccagcacgcccgttaatatatgcttctccgcttgtcgcaccgtaaaaagccacgttgccgataatgacattgtcatccgaagcagagttgaatccttctgatgacttgacgatgatttttccgccagaaagcccttttccgacgtaatcatttgagtctccgtccaaataaagcgtcatccctttaggaacgaaagctccaaagctttggccggctgatccggtaaagtgcagcttgattgtatcttcaggaagaccttcttctccgtaacgctttgagatttcactgccggttatcgttccggctacacgatttgtattattgatttcaatcgaaatatcagcttcttttccagattcgatggcttcttgtacggccgggagaattgttgtaatatcaagtgattgatcaattttatgattttgcggcgattggaacgtccgcaccccttcaggctgataaagaagggtagacaaatcaagctggcttgctttccagtgctcctttgcccgttcacttacatgaagtacatcagtgcggccgatcatttcatcaaatgtcttgaagcctaacgcagccatgtactcacgaacttcttcggcaatgaacagcatatagttcacaatatggtcaggatctcccatgaactttttgcgaagctctggattttgtgtcgctacaccgacagggcatgtatccaaatggcaggcacgcatcatgacacagccgagtacaactaacggagccgttgcgaaaccaaattcttcggcgccgagcaaggcagccatcacaacgtcgcggcccgtcatgagctttccatctgtttctaatacaacacggtcacgaagtccgttcagcattagtgtttgatgtgcttctgcaaggccaagctcccacggaagccctgtatgtttaatactggttttcggagaagcgcctgtacctccgtcatagccgctgatcacaatgacatctgcagtcgctttggcaacacctgcagcgattgttcctacacctgcttttgacaccagctttacgctgattcttgcgtcacggttggcatttttcaaatcgtggatcagctgggctaaatcctcaatcgaataaatgtcatggtgtggcggaggtgagattaatccgacacctggcgttgacccacggacatcggcaacccatggatataccttgttgccaggaagctgcccgccttcacccggcttagcaccttgagccattttaatctgcagctcatcagcattgacgaggtaatggcttttgacaccaaaccgtccggatgcaatttgtttgatcgcacttcttctatcatcgccgttctcatctggaacaaagcgtttgggatcttctccgccttcaccgctgttgctttttcctccaagacggttcattgcgattgctaaagcttcgtgcgcttccttactcaaggacccgaatgacatcgcacccgttttaaaacgtttgacaatcgattcagcggattcaacctcctccaacttcaaaggcttgcggtttccgtcaaatgcgaacaagttccgcaaaaatccgatgcgttcttcatcagccgcttttgtatactgtttaaacagattgtaatcatttctgcggcacgcccattgcaaagtatgaatcgttttcggattaaacgcatgatgctctccgccatttctccattggaagtcacttcccggttcaagcgttttgctgtaatcatcctgatacgcttcccggtggcggcgctgtgcctcttctgcaattgtttgtaaatcgatgccgcctagctgtgatgcagtacctgagaaatagcggtcgatcacatcgcggctgattcctaccgcctcaaagatttgtgcgcctctgtagctttgcacagttgaaattcccatcttggacatcacttttacgacgccctcagtaatgctttttccatatttgctaaccgcttcttcatagctgatatccaaacggccttcatcaatttcctgcttgtaggtcgcataagcgagataagggttaatcgcatctgcgccataaccgattaacgctgcaaagtgatgcacttcacgtgcttctcccgattccacaataatgctgaccttcgtacgcagccctttgcggattaagtgctggtgcagtgcgcttactgccagaagcggcggaattggtgtcagtcgttcgttcatctttttgtctgataaaattaacaaacttacgccttggctgatggctttctctgcctgtgtgaacatgtcctttaaaccgcgttcaagatcctctgaaaacagcacatcaattttttggctttttaaatcaggatgaacaatcgttttcaatgcgtaaaactgttcattggataaaacaggtgtatacagtttaatccggcgaacatttcgttcacttggatgaagaagatcgccttccgcaccgagccaagtcatcgttgaagtgacaagctgctcacgaatcgcgtcgattggcgggttcgttacttgtgcaaacagctgtttaaagtagttaaacagcgattgcgctcggtcagaaagtacagcaagcggagcgtcattccccattgaaccaaggggatctttgccttctttaataacaggaattagatacttttggatatcctcatatgtgtatccgaatgccttctggcgagtaagaagatcactaaattgttcttcttctcttgactccggatcaggatttacttgtacaagctcttcttcaagccatttttggtacggatactcagttgcaatttgtgttttgacttcctcatcggagataatacggccttcttccaggtcgattaaaagcattttcccaggctcaaggcggtttttatataaaacgttctcctgttcaacttcaataacgcctacttcagatgagaaaataatataatcatcttttgtgacataataacgggccggacggagaccgttccggtcaaggatcgccccgatttgtttaccgtcagtaaatgaaatagctgtcggtccgtcccaaggctccatcagggagctatggtactcgtagaacgcccttttttccttggacatatgcgtattttccgtccaaggctctggaatgagcatcattgccgtatgtgccggtttgcgtccagccatcacaaaaaactcaaatgcgttatccaaaatggaagagtcactgccatcagcattgagaatcggcaaaatcttgtttaagtcctcaccgaagctttcagaaacaaattgctgctcacgtgctctcatccagttgatatttccgcgaagggtgttaatttcaccgttgtgaaccaaatagcggttaggatgcgctctttcccatgtagggaatgtattggtactgaagcgtgaatgaacaagcgcaaaagcagaaacgaatgcttcgtcttgcagatcagaataaaatgcatcaacctgttcaggtgttaaaaggcctttgtaaacaatggtctggcttgaaagactggcaaaataaaaatcaagaccttccgttactccccaattttcagcctgtttacgaatgacatacaattttcgttcaaaagataaattgtcctttagatcagaacttgcgccgataaatacctgacggacaaacggacagcttttttgcgccactgttccgatttttccgacatttacaggtacagttctccatccaagaacgacttggccttcttgttcaattagtgcattgatttgcttttcaattttttttctttcatcttccttctgtgagaaaaagaccattcctaccccgtaacgttctttttctggcagattgatgtttttgcactcttttctaaagaaagcatcagggatttgaaccagtaagccggctccgtctcctgtatccggatcactgccttgccctcctctatggtctagctggcaaagcatcttaagtccttgtttgacaatgtcgtgagtctgcttgccctttaagtgtgcatataggccgattccgcatgcatcatgttcaaattcaggacggtagagaccttgagcttttggcatttgattgtacgtcataattcctctcccccgatcaatttccgataataccggtcataaaatctaacaactctataatcattgtaggttttcaaaacgatataaacaatatataatttagatcaaaagaatctcaaaatgagatagatggatgtgagacaaacatggagctgcgccaactgcgttattttatggaggtggctgaaagagaacacgtttcagaagccgctgatcatttgcatgtggcccaatcagcaatcagcagacaaattgccaatcttgaagaagaattaaatgtgaccttatttgagcgtgaagggagaaatatcaaactcacgccaatcggaaaagaatttttaattcatgtgaaaacggcgatgaaagccattgattatgcgaaagagcaaattgatgagtatcttgacccgcatcgcggaacggtaaagatcggctttcctacaagcctcgccagccagcttttgccgactgtcatttcagcgtttaaagaagaatatccgcacgtcgaatttttgctgcgccaaggctcctataagtttctgattgaagctgtcagaaaccgcgatattgatctggccttattagggccggtgccgacgaatttctctgacataacgggaaaaatattatttactgaaaaaatttacgcgcttgttccattaaatcatccgcttgctaaacaaaaaacggttcatttaatcgatttgcgcaacgaccaatttgtattgttcccggaaggatttgtacttagagagatggcaatcgatacttgcaaacaagcaggctttgctcctctcgtttccacggagggtgaggatttggatgcgatcaaagggttagtgtccgcaggaatgggcgttacccttctgcctgaaagtacttttgctgaaacaacacctcgttttactgtgaaaattccaattgagttccctcaagtaaaacggactgtcggaatcattaaaccgaaaaatagagagcttgcgccttccgcgaatgatttttatgagtttgtcattcaatttttctctaagctggagcagtatcaataaaaaaaatgaacccgagcttctatatagaagcttcgggtttttttctgcaaattaatttacaggtaaagaaaaatccacatggcaaacaaatgcttcttgatcaattagagctctatttgtcagttcctttttcttttccggttcttgaagctgtacagaagagtaattgacgattccaaggccgatttccgtcccttttgaatccatcagccgaacaactgaaccgcttttgaatttccctttaatcttctgtacaccgtctaggtataaactcgattgtccgtttgttatttttcgtgaacaatcatctgataaaatcatttcaccttccggaccggaattaaaagcgatccattgctccttttgattcaacggaagcgttccttctgcttcaaaataggtgccttccgcctgttcatgaacggcgtggtataaaatatcgccagcatctgcctgacctaggaaacctttaatgccagacgccattacgattttaaacgcatcaagcttagagcgcatgccgccggtgccaacgatgcttccagtgtcacctgcgcatgcttcgatgtcaggtgttatttcactcacccgctgtatctttttcgcttctggatttgtgcgcggattgccgtcatataatccgtctatatctgataaaatcacaagcatatctgcatcaatcaatcctgcgacttttgctgcgagcgtatcattgtcgccaaacttgagccgattgacggtaactgtgtcattttcgtttatgatcgggatgatgccgcgctcgagcagtacattcattgtattcctgacattgttgtatcgatattcatcagaaaaatcgcttctcgtaattaaaatttgggatgcgacatagccgtgtgccaaaaacagctttgaataagcctccattagcaatccctggccgattgaagctgatgcttgtttttctggaagcttctcgggcctttggataaatccgagcttccgatatcccgccgccactgcgcctgaggaaaccaaaatcacttcataaccggcgtctttgagtttgacgacctggtcgaccaacgcttctaattttcgaatgctgatttctccatgaaggcttgttaatgaactgcttccaatcttcacaacgactcttttcatgcttgtatcaggcgtcactttatcactcctgatagcggcgctgcagttttttcgatatcttcgctgatttcctttgaacgcttagccgcatgctttattgcttgagaaatcgcttctccgccgccgctctttttcaaggcttgcagccccgctgctgtcgttccgttcggtgacgtgatattatctcttaagatctcaggatgttctcctgtttccatgagcatttttgcggcacctaaaagtgtctgtgcgccgatgcttcgagataactgtttatcgaggcccgcttcctcgcctgtcttttcaatgaattccattaaataataaaaatacgcgggtccgctgcctgcaattccggtgaatatatccatttgattttcttggattgtatagacttcgcccatgcatccgagcaatgcttcggccagcttcttcaggtcttccgacacatatttgccaagggcaatagctgttgcagaagcgccaatcatactggaagtgttgggcatcactctgacaaccggctgttcattaagcaatgattgttcaataaaagaggtagttatgccggcaaggaccgacaatattaattgatggggttgaatacgtgattttagtgatgacagagcgttttcggcgtcttttggcttcattgccaaaatgagcacatccatgtcttcaatacatagttggttcggcaaggcgcctttaatgccatattgaagttcaagttcagttaatcgctctgtattgctgcggtttgtaacgcagatgttttgtttcgggattttgttggctcgaacgatacctgatatcattccttccgccatagatcctgctcctataaaggctactttcttttgatcaaagatcggtaacatctcctttgttcgcttttttgttcgcattttcacacgtttaaaatgttaccacgtgaggaaatgatgtcaagtttgaaggccattattgatttgtattgtttcttttcgacaaatatgtataatgaaaagcagaaaacacccggttcacactgctgcgccgggtgtttgtttctattaaaaattatctgagagagctttttcaatcagttttttacagcgatccagctctaccttcagctgttttttatatagcttggcagcttcgtaatctttaaattgatagaggacgacttcctggagcttagccccttctttttttactttaatttgttttagtatcccgtcatcaagaagctcatgcaaagaccggtatacttctgtatgatttggtttaaaaccaatctctttaaattcagaccgaagtacttcaagcagctttaacccatagagtctctcttgctctgtcatcgttatcatataaagcttcaaaaatgcgcgctgtttcactaaaaagcctgttgaactccttttttcttctttcatcatatgcactccttcttctgtcactgacaacactatgtactaaatattcaattttcttttattgttttccttctttatattaaagactgatagtccagttatttcatgtttactgattataggtgtagcggaaaaaataaatttcgactgaacatttggtacatagttttcttagttctattatagcctgcatttactgctatcttcaatttaaacgattgccagggtttacatatctcattttaccggtacggatttcattcaaataaaaaaacctgtcgaaagacaggttttcatttttaaggatttgttgaccataatcccgctgttttgatgaaaatacgaggatctaatttcagttgtgccaccatgtactcagcaagatcctcaggctgcataactttttcaggattaccgtctgttaagttcaattcgatagacatatcactagcgacagtgctcggcgttaacgcgctgactctgatattatgttttctcacttcttgcataagagactctgttaacccgagaacggcaaatttagaagcgctgtaagcacttgttacagcagctcctctttggcccgctgtagatgaaatattaatgatgtctccggctttgcgttcgatcatttccggaagcaccgcgcgagtgacatggtacacacccattaggttgacttgaataatattttcccactcatcagctgacagatctaagaaaccgccaaatttgctgatgccggcattattaatgaggatatcgatatcaccgagctgttccttcacttgagctacagcttggttaacctgatcggcatcttttacatctgcagcagcaaatgcagcttttacaccaagcgctttgacttcttcagccactttttctacattagcggaagtccggccaattaacccgatattcacgccttctttggcaagcgccagagcagtagcgcggccaattcctctgcctccgcctgtgattagtgcagttttatgttgtaaactttgcaattgaagcaccctttctttgtttacatatgtacgatatcacattataagtacaatacatccaatacgcaaatcaaacgaactgtgtaaatatcatttcttctgattaaaaaaacggatacagggtaatgacataagaaaaggagtgaacatatgattatagtttatatcagtcttgcagtattagcagtttctattatcttcttaggagttaccgtgatccaaaacaagaaaaaaatagaccccgcactaaaggagctttcctctgttacgcaggctatgcaaaaacaaatcgaaggattaaaaacagaaacagagctgctgacgcaaaaacaaaagaagattcagcaggatgtccaaataaaaaaatacacgcttcagcagaccgcagctgaagtgaaagaagttccccaagcagtcaaagaggtgtggcaggcaggacattttaatagcagataaggatgaatgagatcccgttgttacgatcagaatggacaaatgggatctcatttttcgaggaggcttacacatgattataaaccgcagctgcttaaaagagttcgcagaaaaagtacattttcttccctcttcacttacaaagtccgatttacttactgatccatttcgtctccatcaagaaaacgaacttggcatctactattcacctcataatgaatttatcaatcgggatgcctcgcttgtgattgccgggatcacgcctggtttttcccagatgaagacagcgtacgaaacagccgccgaaagcctgctgcaaggcgggactcttgagcaaatggcagtagacacaaaaatagcagcgggtttctccggatcgatgagacataaccttattaccatgctggatttatgcgggctgccgcaagcttttggcattcaaagcgccgcaaagctttttggagaattacggcatatgctccatacaacttccgttattaaatatcctgtctttatccagcaaaaaaactataccggatacaaaccggctatcactcattctcctatcctaagcacttatgcttttgggcacttccctgcagagcttaaccatgtgacgggaccagctcttctcattccgttaggaaaagcggccgaaacagtgtgtgaaacattgatcagacagcacagcctccagaatttgatttgccttaacggctttccccatccatcaggcgcgaacggccatcgtttgaaacaattcagcaaaaacaaagagcaactagaaagacaaattcgttcctttgctgcattggttgatttcgctatagaaaagaggaaataaaagggatatgataaacaaaaacacaaacgtggggagtggttgaatgtttcctatattagaaacggatcggcttatacttaggcaaatcacagatcaggatgcggaagccatttttgcttgtttctcaaacgatgaggtgacacgctattatgggcttgaaaacatggaatctatagaacaggccatttcaatgattcaaacgtttgctgccctctatcaagaaaaacgcggtatacggtggggaattgaaagacgggacactaaagaactgatcggaacaattggctttcacgctctggcccaaaagcataggcgcgcggaaatcggttatgaaatcatcccggagcattggcgaaacggatttgcatcagaagtcatttcaaaggtcgtatcttacggattttctgcccttggactgtcgcgtattggcgcagttgtatttaccgataatgaagcatcaaatcgtctgcttctaaaaatggggtttcaaaaagaaggcgttttaagacagtacatgtatcaaaatgggactccatatgatacaaatgtgtactctattgtgaaaccaagagaatgacggtattctcttggtctgtgccacatcccttttcctttaaaaagataaaaagcgcccctcaaacagggcgctttctaattaagatgcatattgaggagatgtttcctccttaactgctttttcctcaggtatatgaatacattttgtcaagaccgcacttgcaaggtaaagggccgcaaagatccagacgacaccttgcgcgccgacgagaccgatgaacagccaagcgagtgcagggccgacaaacgctgataaacctgcagctaaattcaatacagacatggctgcccctttatcttttcctgccaccgtcggcacaattgcaccaatcggcacatagcctgccagcaaaccgccccaaataaagccgatcacgctgacaaccgctaaacttccgccggagaaaacaggtgcgtagtataataagacggtgaaaatgccgcagccgactccgccgaaccaaataacagtatttttccagccgaatttatcgccgacaataccgaagataaggttaaacacaatgttccccaggaaaatcgttccccaaatttgcagccacacattggttgaaattccatgctgggccatgtgcatcggcaaaaagactggaaaaccatatgtaccaatgctgttgatgattctgatgattccgcctgtaagcacgcgcggatttgtaaatagaatcgtaaccccttttaaaagctcctcggctgtttctgatctttttcttttcttcttttcaaaacggtctttattgataaacaatgcaaagaatgcaccgagacatacccagaaaatagagctccaaagcgtattcaaataaccgaacgctttgatcgcgtagcttgagtaccaagcgccgaacacaaacatgccgaggcaatatgcaatccaaaaccagccgacagcagtgctcagtttgctttgcggtgttctgtaaatgacccatgtcaagaaagaataagcaaaaagcgggtaacctaacccttttacgaagtaagtcacatacatcactggcaggttcagctgttcaaatccaaatacgataaaagcagctgtaccgatcacataaaacaacagccccataaacatcgttcgttttgcgccaaatgcttcgagacatacacccgaaaaccaggaagctatggcaagcgcaattccgtatatactaaaaatggaagcggactgctgaacggtgagcccgttttcgatcaaaaaaggactgagccagccttgttcaaggccatctcccatcataaacaaaacaacccctaaaaatccccaggcaagccgcttcggtattcctattttatccaacatatctgtctcctccttagatgctattattcattaccgtattaccttattaaagttgaaaattaaatgattcctcaaaacagcagaaattccgtcttaaattaatactttgctttctgatcctgaaaaaaagcgctgtgtttgcttccattcctcatataaagccaattctatctgacagtccttcggttcgatcacccggacatttgctgacatctcctccgttaattgaaaggtttcattgcaaatgactgcagcaccgacgacagatgcctgatgatatccctcttggacatagacctttttttgaagaagatccgcgatatattgagtgagcgctttgctttggaatccccctccgcacacccaaacataatcacgttcaaacggagtaacctctgttaaaatgtcaaagttccatttgattgaaaatgcgatctcttctagcgctgcacgtacaaaatgtgccctctttaaatgtgctgacagcggggcatcaaaaagaaaaccgcctctcgttaacgcattcttttcagccgataaataagagccgagagccgctacacatgcatggtcttcttttgcaagtgcagaaatctcctcctccattacttcgtacgtttcattcggataaaaaatctgttttaatttttgataattcaagccggtaattcccggattcgtttccacaagccaatgcccttgatccgtatgacagttcaaccaggctttatgttttgtgtcgccatgatcctcagtaattttggttattggcgttgttgtccctgatacaatgacaatgtcctcaagtccagctccggtgcttttgacagccagctgtgtatccccgccccctgctataaccttagcatttattgaaaggcctaattcggatgcatattcatttgctatcgttccaattgctgttcccgctcttacaagaggcggaaggatagatggagaaaagccgaaaatgtcgcacatctcttctgaccaagtgttttgcttcacatcaaatagcagggtttctgttgcctgtgatggttcatatgttaatattccgctcagttggtacgtcacccaatcactgatgcttgtaaagcttgcagtcttttcccataaagagggctggcgctgttttaatccataaagcttgagcgcagaaaaaagtgcagttggcaggcggcctgtgctgctgtatatctcttcccaatcgggaatgcccgcctcccactctcggccgcgattatcgatgttcggcagcccgagaaaaggattgccgttttgatcaatcaaaacaatcccctgtctttggctcgtcgatgtcaaaccaatgatgtcaatatcacacgaacgggatagcgcacgttttgccaaattcatcacctgcttccacagcacctgaggagaaaaataacggctgtccgggtaaagcgtctctgtggaatactcgatgtcctcccgttcaactgttagaacactgccagttacactcacgaccgctaccctcgcattgcctgtgccaatatcaaaaacgagatagcctttttgttttttcattctgttagcctcctttcttatccccctgttttcagtgcgtccttgttatacattgtctgaatattaagagttttttcacccttccactttttgagggctttattcagtatcgtcacgtgatgatcctccacttcaaatgttgctccagcgagatgcggtgttgccagaacattaggcaatgaaatcaattcataatctgattcctctggaggttcatgataaaaaacgtctagtatcgcaccgctgattttatgttcttttaatacaaataaaagatcttcacggtttacaacaactgctcttgaagtattaacgaaaatcgcactctctttcatcagatcaaaatattgccgatctatcagtccgagtgtttcctcagtgcgaggcagatggacagaaacgatatcgctgtctgaaaacaccgttttaagagatgctttttcatacaacggatgatcgtcttgaatgtatggatcgtaatattttatcttacagtcaaacgcagtcagcagttttgcaatcctttgcccgactgcgccgaacccaatcatgccaaccgtttttcctgttagctcatttcctttaaatttgacataagcctgcaggtaatcactgtcccactctccatccttcagccactgattcgaggcgctggtatggcgcagaaaggaaatcacatttccaataaacatttcggcaacggcttgtgcattccgccctggtgtataaaaaacaggtatgcccctttttgaggcagctgccacatccacatttgagggcattcccctgcaaacaccgacaaatgaaagttcgggaacagaagcaaatacgctgtctgttacctgatcaagttcagtaatcaagcctgtcgcatttgttgcttttagcagctgaatgagttcatcctcccgatatgccctaccttgttccttccaagattgataagcaactgagccaaacaagttttcaagctcttttcgtccttcttcgttgtacggtgctgtaaccaaaaccgtcatgctgcaaaacatccttttcatcgtatttttcataaaaaaaatctctttccgaagatggaaagagattcatatataggcgcgctctgttacaggcagacgccggtataaaccttgctttcctatctttcaagctagcgcttgctggaattggcacaataatgttgccgaggtttcatagggccagtccctccacctctctggatagaaaatattgagtatgtaattttcagaatgaagaatacgtttatcataaagaagactcagattgatgtcaatctctttttttcagaattgacgttatcatcggaaatgttataattcttacaaaatatctaactagagagaggaactgggccatgagatcttttgccacacaacaaaacggcattttcaaatccgtttgctcgctggactgcccggatcagtgcggattgttaatacataaaaaagacgggaaaatcgtaaaagtgcaaggagaccctgatcatcctgtcacagctggaaacatatgcaacaaagtccggaatatgacggagcgcatctatgatgaaaagcggctgactacaccgctcaaacgaacaggtgcgaaaggccaagcgatatttgaaccgatttcctggaaagaggcaatcgatacgatcacctcccgctggaaacagctgattgatgaagagggagctgaaagcatacttccttacagcttttacggaaatatggggaaattgacagctgaaggaatggaccgccgctttttttaccgcatggggtcaagccagcttgaacggacgatttgcagcaaagcgggatctgaaggctataaatatacaatgggcataagcgcgggaatcgatcctgaggaaaccgttcatacaaaactatttattttttggggaatcaacgcggtcagcacaaatatgcaccaaattacgatcgcccaaaaagcgcgaaaaaaaggtgccaaaattgtcgtgatcgatgtgcataaaaatcaaacaggacgtcttgcagattggtttatcccaataaaaccgggaaccgacagtgcacttgctcttggcatcatgcacattttatttaaagaaaaccttcatgatgaagcatttctgtccgagtacacggttggctatgaagagctccgtgaacacgtgaaacaatatgatcctgaaaaggtatcgacgatcaccggtgtcagtaccgaagatatttaccgactggcaaaaatgtacggggaaacctccccttcttttatcagaatcggaaacggaccccagcatcacgataacggggggatgattgtaaggacgattgcctgtcttccggcgatcaccggccaatggctgcacacagggggcggcgcaattaagcataacagcggaattttagaatataacacaaatgccttgcagcggcccgacttattgaaagggcgcaccccgaggtcgtttaatatgaatcagcttggcagggtgcttttggaaacagacccgccgattcgctctctatttatttacggaacgaaccctgccgtcgtcgcgcccgaagcaaacaaagtcagacagggcttgctgcgggaagacttgtttactgtggttcatgatttgtttttaacggaaacggctgcatatgcggacattgtactgcctgcaacatccgcttttgaaaatactgatttttacacctcctactggcaccattacattcagcttcagcagccggtgattgagagatatggggaaagcaagtctaacactgaggttttccgattactggctgaagccatgggattcacagaccaggagcttaaagattcagatgaagtattaatccgccaggcgcttgaccatccagataatccgcatttggcagagattgattacgattcacttactaagcattcatttatgaaagcgaaacgtgaaaagccgctgtttccgggcgaacttccaacgccaagcggaaaaatagaattatattcagaaaaaatgaaacaagacggcttccctgctttaccgacatatacacctcttgtaaccgataatgaacatccgtttatgtatgttccggggccaaaccataatttcttaaactcaacattttccaataatgaaaaacacatcaagcttgaaaagacgccaaagctctttatcaacacaaaagatgctgaaaaacacggaatcgttgatggggcacctgtacgaatttggaacagccggggagaatgcgagctgaccgctgcagttggagaacaagtgctgccaggtgtcgttgtcagccaaggattatgggcggatgaacaaggaaaaaaacagcttgtaaacgcgctaaccccagatcgcttgtccgatatgggcggcggcgccacctttttttcaggccgtgtacagattgaaaaggtttgaaaaataatgaaacccggagtatgccaagcccgtataacataacatcgacataatggaggcatacacatggacgtttttttaggaattggtattgctttggctggatattttatcggtgaaggcttaaagcagaggaaccaaaccaaaggtaatgaacaaaatgatatcttcctaataaaagaacgggatatttacttttacattggactttttttaggaataacaacgactgaagcaaaacagttagctggagacatggcagacctgccttacatcgaaataaacggaaaaaaatatgtccagaaacatatgttaaaagattggacattcacattagttgaaaaacatcagggtgaataaaacaaatctgaggagagcgagattcattgtcacgctctcctctgtttagctgtatggatcctgccaccaaaactttgtgctataagcgctgataaaacgataaaccaccatctatgttctttcctcaaacaactcaagatgcccgttccacaacaatagtttttatattcctttgatgacgtgatgttcttgatgaacgtatgtatcgtaaaacacttagaaaacctattcggtttgaatgtgtgctctcattatgcccccatactgcgcctttatccgcggaggatttttttaaaaaaatatgaaacctaaagcttttagatcctgaatttttattgaacctccatatttctccgattggtaaaaattagcctatacaccggaagctgtacgtttataaaggatcagagaatcccataaccagtaaatcactgcagccgcaatacttaacatataataaaagtacgattgcaatgtccatgctattgacgcaggttcattgataacaaaaaacaggaaagctgcgataaaagcaaccacactgtaaatcaataggtacatgacattgaaagttctcgcttttttctgcaacttcatttggagcggaacagcaaaaaggccatacaccacaaaaccgtataataaagcaattgctgccgtaaacaatgcaattatcatatcgccatacataacgaaagaataaaaccctaataacaaaccaaatgtaaggctggatagccctaatgtcattaaataatatgatgcgatttttttcattttttcaccccccttgtttgatttattcacagtgctgttagtataaattcacaacctttgtatttcttttatcgagatgtcttccctaacgtgctatacgcaatgcgctaataaaaggtttcaaaaatgacgttcttttattagataatacgctggctgaaaacgcctctcctgattggccaaagcgcgaatgaaaaaagtgcatgaatacctgcccaacagacagaataagaagagttgatatttcaacacttttcgtaaaggggtgaaaccaatgagtaagaaaggtattcaaaattcaagtattgaacaaataagaaatgaccatgagactgaaacagcttttaaagcagatgatcctaaaaaacacggttccgatcctaaaagaacgaaataagttcttacccccactaaaatatcaataatctggaggaagtaaagtgactcaaaaaaacggtgcagacagacctgatgattataaaagattttcttcattagacaaggaatatgattttcagcaatctatacgcagcaatactgagacagaaagtgtaaacactgaaacacaaactcataacaaagaaaacaaaaatgacacaacagatgttgccgggaaatactttgagccctcagattataaaggaagcacgcaattagaaaaaggattggctgaaactcatgaacaggtcagcgatgactattttgaagggacaatcgatcaaaatttggactagccatacaaacggaactaacttaaaagaagtcagttaactctgtttttagaaacaaccacagtaaaagtagccaacccccaccgaataagatgggggttgcacgtaagtagcctgtttaatatttaaaacgattaatgacggtttgaagttcttctgccaactgagatagagattctgcggcataggagatttcccccattgaatgaagctgttcctgtgatgaatttgcaaccgcttctgtatttgctgacgtttcttttgtaccagcagccaatgtatgaactgtgtgctgaatcacttcaacgcctgaagtaagctgttgagttgctgctgcaacttcttgtatttgagaagtgacctgttccaccaggttcagtatttcattgaaatttcctgttgtctcttgagaaagaacaatacctgagctcacattttcttgaacaactttaatattatttaccgtttctatcgattcgttttggatggtcgctaccaccgattggatgtggtttgcagatttatttgtttcatccgccaacttccgaacttcttctgccaccacagcaaatccttttccttgctctccggctctggccgcctcgatcgctgcatttagtgccaacaaatttgtctgctctgaaatcgtcgtgataagcgaagagatatcgctgatttctgctgtgctcgctaccaatgtttgcaatccattgccggctgaatctacagatttatcaatgaatttcatctggtctaacatcttgttgacggacttagagcctatttcagccttgtctctcatcgaagaagaaagatccgctatgttccctgtatttgaagcgactgatgatatactgtctaataattcagtgatggattctgcgctcttttctgtcattgagctttgcttcacattgctgtcggcagccatctgcatggctcgtgaaatatgttcagatgttgatttcgattcttccgcgcttgccgataattcttcagaggaagcggcgacttgttcagatgagctgctgatctgcttcacaatttgagttaatgaatgagtaaaagaattaaaagattgggcaagctggccaaattcatctttatttttcacaatgacttttttggttaaatcagcctcgccgtgtgcaatttcctccagctgcttatttatgcttcttagtggcaccataatggactttaacagcattatgcttagaacaatgcctaatattactgatatccctgtgacaatgataatgagcgattgactcattttcccattgccctgtatttcatcctttagatcctctacctcttgatccaggcgatcagacagcttattgacagccggagctacgccttcttttcttattgttctttcttctccaaaatggatggtttctgcttttttaggatttgaagagtaggctgttactacttgctgattcaaagctctatactgagtaaaacttgtcttaatgtcttcaatattggattgatacttctcttcatcaatcaagtcattaacccggtcaaggctctttaagacatcgtctgcttttcccttcataccctcgtcgtattctttgtctctggtaatcaagaagcctctttcatcatttgataacccggtcaattcatattggatgtgttttatctctttttggaattccattttgtctttaagttcttcattctttttcacagtagaagaaatcataaatactgaggagcctccaattccaataattgaaacaactaatattgatataatccccagcaattttgttttcactttcatgtgtcgttttccctttccgcacaatgtaatggctgaaataaaatatgttcaagcgcgtttgaatccaattcgcttacgctcatgtccataatatcgacacgtgttatcaagttttatagtgatattcttatatgaataagcaaattctttacgtctctgaacttacagaaaaaccttaagtaaaatttgcagtcttttgcggtatgtaagtcactcttattcgtttttctaaaaaaggcttttcccacctcaaattggctgaaccggctgttttctcgaaaatataatacaatacgcagcataatatgaaggagcgaaacttaaatggggatcatcaatggtaaagaattcattgaccgattgaataaactagaaaacgaaatatggtatgatggcgaaaaaataaagggtaacatttctgagcatcctgcatttaaaggaataatcaaaacaaaaagctcactttatgaattgcaaacaaaggatgagttaatacatgaaatgacttattgccttcctggagatcataatcgaatcggcctttcctatctccagcctaaaacaaaaaatgatttgaaaaaaagaaggaccatgattgaacattgggctagacatactcatggaatgatggggagaagtccggattacatgaatacggttatgatgagctttgcttcgtcagcggagcttctaaaagataaagagaattgctttcctgaacatatactagatatgtatgaacaagctgctaagcatgacctttcctttacccatacattcattactccgcaagtgaaccggtcacagtcctattttgggctaagtgaaaaaccgatatctgctaaagtcattgatagaaccgaaaaaggtttaatgattcatggcgcacgactgcttgccacacaaggcgggttgaccgatgaaatcttggttttttcagcgcctaaatttttctttgaaacagatgaagcttatgctttttcaatcccttctaatacaaaaggcgtaaaattcatcacaagagaatcatttgtattaagcgactcttcctttaatcatcccttaagctcaaggtatgaagaaatggattcaattgtggtttttgatcatgtgttagtgccgtggaatcgtgtgtttttttacgataatgtggaagcagctaaagattttatgacaaaaagctcttttcatgcctttacctttcaccaggttgtcattaggcaaatgataaaaattgaatttctattaggtgttgcacagcttcttgtcgacaccattaatgtttccgaatatcagcacatccaagaaaagctctcagaaatcattgtgggattggaaacaatcaaagccctcattgacaaatcggaaaatgatgctcagttagatgaattcggctatatgcgcccctgtttaattcctcttcaagtcatcagtacgatcattcctaagctatatcctcgatttactgaaatcatacaattaattggagctagcggaatggtgacactgcctaccgaaaatgcatttgactcagagatacgggaagatcttgaccaatatcttcaagcaaccaatacaaatgctgaagaacgtgtgaaaattttccgtttggcatgggatttaacaatgagttcattcggaactagacaaactcactacgaaagatattttttcggagatcctattcggatttcaagcaggctgtataccagttatccaaagcaggagcagttgaacatgattaaaacatttttacatgcagatacagaacattgaaaaaacagcgggaaaagatccgctgtttcgtattttttattcaggaaactgaacatggcccggtactgtataggctttggacgttccgctttcaggcagctttggaatggtgtctttcacaacttttccgcggatgtcagtcattctgactttgagagagccagtacctaaattcgtactcacaaaatggttatagtccattttctccatgttgatccacttaccatccttttcatattccattttcataacaggatacttgtgatttctgacttggattgctgcccaccacctgctgctgccttctttgatccggtacgtgaaattgccggtgattggggctttgacaacacgccatttaatattgatttttccgtctttcatattgccgattttacggaaggcattaggtgacagatcaagagctccccgagcgccttcgggataaagatcagtaacatatacggttgttttcccttttggcccttcaacttccaaataagagccggcaagtgccgcttttactcctccgtaattgagatccgccggatttattgcagtaatctccatatcggaaggaatgggatccagcaggaaagctcctcctgaatagcctgaccctgtatacgttgcataaccttcatgcaggtcgtcatatgctgccgaagcttgcggggaaaaacagaagatcgtcaacaaaaccataccaacaaatgcactcatgatctttttcatatttggtcctcctcaaaccagacttcaaatgagaatcattatcattataagactcaatccatctggtttgaaagaggaaatagattcatagttgattttaaggcaaattcactatcattcatatatcaaatgtaggtacttatgaaaaagccaatacaaatgaacgaatgtgcacttcagccgaatgtcttatttttccctctcaaaattcgcatttcaataacgaaatgaaacaggctgttggcctgataacagctatacaggaaaagctatttttccccgctcagtttcaacttagctgtcatcatgatgccaaagatcagcacaatcggaacccaaataatgaagtgataaaaatcaggctcagccagagcaacaataatagcccctacacaatacaaaataatagccagtgctcttaacacagtatctcttaagaaagtcttcttttgcttcttaaaaaacaaacggccggatatatcctctaaaagagaagccaaagtgccggtcaacacagttgaagaaatacctgcaatccccagtttttttgctgctgtagtttgaatccccatagaaatgctcatgagtataattagaatgtgcacaggaacaaatgcccggtaaaaagaaagacaagcaaagacaaacaaaatgaatgcttcaagtgcgagggcttttgtcacagcagaaggccaaagggtattttccgcctttccgaccatcaatgtagcaatgatcacgccgcatataaatccgattagcgcagtcaaggaattaaaaacagtgacctgaatggatttgccgatagctaaccccaataatacaatgtttccagtcatattagctgtgaacacatgtcccaggcttaaatacccgattacatccacgattccagctgttaaacataaaagtgatagcaaggtgtttcgataagctgctgcagtcaacggtgtatcaatcctttcttctatttcaattgttagtatgtcttttggcgcaatctctattttttaagtaacccaacattaattaggaagatagaacctattattcctttccattaactgtaataataatccccgcaaggaaatgattaaaattgaaaggaagcatattgtgatgaaacgactttgtttatggttcaccgtctttagcttgtttttggttctcttgcctggaaaagcattaggtgcagtcgattttccgaatacctcaacaaatggccttttaggttttgccggaaatgccaaaaatgaaaaaggcatctctaaaacgggcacaacgggtggaaaaaacgggcagattgtttacattcaaagcgtaaatgatttaaaaacccatctaggaggatccactccgaaaattttagtgcttcaaaatgatctttccgcatctgcgaaaacaacagttaccattggctcaaataaaacactcgtgggctcttacgcgaaaaaaacgctgaaaaatatttatttaacaacttcatcagcttttggaaatgtcatttttcaaaatttaacgtttgaacacagtccgcagattaacggaaataatgatatccagctttatttagattccggtatgaactattggattgatcacgtcacattctcaggtcatagctataatgcaagcggaagcgatttggacaaactcgtgtatatcggaaaatccgcagattatatcacgatcagcaactcaaaatttgcgaatcataaatacggtttgattttaggatacccggatgattctcagcatcaatatgacggctacccccacatgacaatcgccaataattattttgagaacttgtatgttagaggcccaggtctgatgagatacggttactttcatgttaaaaacaattacagcaataattttaaccaggcgattacaattgctacaaaagcaaaaatatattccgaatataattactttgggaaaggcagtgaaaaaggcggcatccttgacgacaagggcactggttatttcaaagacataggcagctatccatcactcaacaagcaaacctctccgctgacttcttggaatcctgggtcaaactatagctatcgtgtccaaacgccggaatatacaaaagaatttgtcacgaaatatgccggatcacaaagtacaactctggtatttggctactgatataaaagaggccctgcgttaaaaacgctgtgcctctttttatactataggctatttttaagcgatccttgtaattccatcaagatccagcgtcggtcaaactaaaaagcatatgttcttttccacaataacttcttaactggctttcttattataccagtttatcgcaagtgaaaagaaatcattgttctgaacctgtattaaatgaacgatcgtcccacaaactacttaaaaacccctaaaaaggatgatggatatgtgcggcaggtttactttgtactctgcatttgatgatattattgaccagtttgacatcgatcaattttttcctaaaggtgaataccagccaagctataatgtcgcaccatcacaaaacatccttgcaatcatcaatgatggatcaaataatcgcttaggcaagcttagatggggacttattccaccttgggcaaaagatgaaaagatcggttataaaatgatcaatgctcgagccgaaacaattaccgagaaaccggcctttcgaagaccgcttgtcagcaaacgctgcatcataccagcagacagtttttatgaatggaaacggcttgattccaaaaccaaaatcccaatgcggatcaaattgaaatcatctgctctttttgcgtttgctggcttatatgaaaagtggagcacacatcaaggataccctctttatacctgcaccatcataacaactgagcctaatgagttcatgaaagatatacacgaccgaatgccggttatattggcccatgatcatgaaaaggagtggcttaaccccaaaaatacaagccctgattatctgcaaagtttgctgctgccttatgatgctgatgacatggaagcataccaggtttcatcattagtaaattcacccaaaaataattcagctgagcttcttgatgcagaaaatcatatgtagtgattgaaaaaattctctagcaagaacttgtcaaatagctttgttccttaggtgccaatccctctagtaattatgaatatttagtacatagatcaattagttatctttagcatcagtttgaaataattttattatgtaaacttaaataagcaatgttattcctttcatataaaatagtttacatttttataaaatcgcttcacttttctattttgtcagcaaaaaaactgaaccacattaaacttatgaaacctgccgcacctgtggattgcaaatatgatataagcccatagaggtaaatccatacactttccctcctaagaattaaatgaaatttctttcatcttacatgaaggtcttctttcttttgtttatccagtgtaatacttaataatatgttgatgaatgcagctggaaaatatataaatcccactccaagaatgcctagtatcgtacttaaacttactatgtaattctttgtcatcgtttgactgtcaatcaatattagaagtgaaatcaatccagctaaaacacctataaaccaagcatcgccaacagcataagaatcatccagcatccctaaccatcgccccaatatagagctcccaatggcagtcaaactggataaaaatatgagtgctttcatttcttctcctcctttaaagccaatcaaactggtagaaatcggccattgaatccccattatcgaatggttaccatttcatttccacattaacattttaaagctcattacaatacgattcaagcagaaaaaccctacataacgtatatatagggatttaataaaacacaggccaaaattcagctctatctactttaaaaagatatgaagggcagctgtgtgatctgttacgtctttacgtaccgggatatttcacaacaggcactttcttcttgcgcagagaatcaagcatgactgatccagcattcaagttgctttgtactaattctttaggcgtcaatgccatccactgattgagtgacacatctgcatagcggttacttttgaacatttctaaaaaccataatgtttctgtaccagtgttttgtatatagtgtccggcattagaaggcacgtatccaacgtcgcctgctctataatcaaatgtgcgggcagtcccatttccgataaataccgtcattcgtccctgtcctgttagataatattgccactcatcgctattgggatgccaatgaagctctctcatcgcgccaggctcaatctgaacaagtgcagcggctatcgtttttgaaattgggaagttagaagaatccacaattcgtacactcccccctggcatttgaattgggggttgatttaacagctcgtgtttaaaggtcatggggacttttccatatggtgactgaatgtcttcactggcgactgatcccggcacattcccttggtagatatagacttgctcagacggaagagagttgaaagcattctccgggacaccgaaatttgcagacagaacatcttttggtgtgtgtgcaagccaatctgaaatggttaacgttgaaaactcagaaaagttcccatcatcgaaaacgagcagaaactcgcagtgttccaatccctgtatggaatgcggaattcctgccgggaagtaccaaaggtcgccgggaccaacatcagcaatgaaatttcgtccgtcttggtcaacagcggtgatacgtgcccgtcccaaaagcatataagcccactccgcttgcttatgccaatgaagctcgcggacgcctcccgcagttaagctcatgtttacacctgcaatcgcagtcgaaatcggaagctgtcttacggtgatttctcttgaccagccgccgtgatctaatttcatgggagcgtctgagaatgaaaatctcaagttaggaatcataccctcatctgtaacaggcggaacaaatatattcggattttgaatatcccgtattatatttcgcgggcctgtatcaatagctccagctccatcacttcgaataggctgcggcacgtttctgtcttcatgattgattggttgttgttccaacagcatgcacctcgttttagaaatgaacaagattttatttcagcctatgcagaatcttagattgctgtgcctaggaatccgcaaataaaaaagtgaccaccaatgtgatcacaaatacatcaaataaactattttttataccatggcttcttatgtaatttgattgcttctgtctgttttttctggcctgtcctccactccacttttactaatacatcatgacctatcacttcatcttcaggcatataatcaaaggtggaaatatggtcctccatgcgtcccccacccggcatttcatcacctgtgtactccgataagtcgtactcatctacgttatcatcttgatacttttcgccatctacatacagagtaattctttcaacaacagtccacttttcttccttcttactcccctgccaatatagatttagaaaataattgggtccaattgaagttttgtctgatttttcaaggttagacatccacagtccgcttttcccgctgccctcatatttcactttgttccctgacaccattacaaataatgtgatgatgcagatgatcaagaatccagcaatgatcaatagccatttcttaatattgttcttttttctcatgtttttcctcactttcctaactttttagtaggaaaatacgatcaaaatgttaccgaaaagaaaataagaaagggctaatgatctaacagatgactgtctaaacttttgacttaaattaaagtgctttctaaagacaagattaaaacgtataacagctcttaaatgcattttttgtttcattgagtcaagaaccttaaaatggctttttattattaaaaatcaagctagtgtattaagtaacttttcaaatttatttatactcatgatctcgtgagtcacaaatctcccatcaaaaaaaacgctaaaagttgtccaaatagctggtgacttttgtgcctcttctttcgatgataactgaattgactgaaattgaacccctttcttttcagtcaattcccgcaaatcatttatcatgcccactgcaaacggacactgagctgtatagtatatcgtaatccccttttcattgatagaatcacttttcacctggctcttaaatgcaggagaatctgcaaggccattccaagtcaaagccattaattgaaaataaggggcagcttcatcttgtagagtaaaccccatatgctcaaagaaatgcttatcacttaaatagggcagttttttcttgcctgcgatatggataatgccatccatgccgcacgctttcgcatctgctatacatttgtccaacaatcgtttcgcatgaccgttatttttatatctgccagacacccacagacaattaatgtacataaaattaggcgcattgataggcacccatgcctcattcgcaggtaggtattcaataaagacttttgcccgttcatgtaagcgatagaacaccaatccttcatccattcgagctttgagccatctcttcttttcattaactgcatgctcatattgtttcgtgcttaatgcacagcaaatatgattgtcttcaatattgtcctttgtgatttcaatgtagcacatctcctctttcccccctttaacataattacatggaattcaacttcacactttacatgcctaatagaataaatacccgttccaacttaaatactttttcttttccattttgccaattaactgtaaaacccttcttttattcagatattatcttgattcctatatcacccatttcaaatccaaagtgtgttcatctttgaggattagatgcactgcttatgctataaatacagtacacgaagttttttatttgaagtaatatttgttacgggacagcaatagtaaataagtgataaaaggggaattaaacttggtggaaaaatgttattcttgtttaatttgcggatacaaaggattaattcaaaatcctttgtataaaggcgagtatcaaaaaacgtttgacatttgtccatgttgcggttttgaatttggctacagtgaggatcatgatgtgaggttaggttttattgtaactcctgatcatttaattgaggctgcatttcaattgtatcgcaaacaatggcttgagagcgggatggtaattgctcatccggaagatattccagaagaattgaaaaatggcaattgcttaaaatttgaagttttgttgaaacaattgaaaaaactaaatcttgacatagaaaattttgaaattagcggtttttaatgatgaaacaggttgcacttgtttaggtttcactgtcattatcagtaaaatgttaagttgaaatgcgcagtcagtcacaaagtctctattcgtattcaataaagactttgtgatcatcgacaaacatttcactcccatcggataaagtatccaaaaggcctcctctggttcttctctatagtcattaatcacagtcactttgacatttgactcagctatgattggttttccaacaatttttcgttttttcctcaggcaaagtaagagatcgaatcatcaaagccattccatctttactgtctaattaacgccatcttcagtgaatttaaaggtctgttttaaattgcgtccttcttgccccttctgtgtccaaattataacaacctctaattcagaggccttatctgccagcataaaatgattgaacttcagcggtgagccatcatttaaactttcagctaacattttagaatcttcttttggtttgacacaattttcatcgggacatccaaaaagcgaaaaccttgtgattgaattagggtcatttctatacaattgcacatccactgtagctgctttttcccctatatttttgacttccaaggaatatacttgatattctcctttatgaggtctcgtaaattcctttacattttttgcttcacttacttttactgaccactggtctgttttttgtgtaataggcaacaccgtaaaagtcagggcatgcgcttttgattggcaaaacgtaaatccaactgctgtaaaaacaattacagaaaataatacccttttcacttcatttatccctccttcctttcactggccgctccttaaagaattgattttgagcaatctacaagctctcttaaccaaaaccttacctgaggttttgtctttactgctctgcatttatttctttcggtatccgagaaggagctttggggatttttctcaatctgctgttaatcacatcagaagagtatagcgtaataatcatacttcccccatacctttttgcccgaattaagattggttggttatattggttttgaaagcgaaagtcaggacctccccagcttaccgtcgcatcccgtccgggcggtacatatggtacacttctagtatgagaatagcgctgaacgatctgcagtcctgcacgatctactgcattaaatagagttgaggacacctgacaaattcctcctcctacaccttcagacaactccccttttacaataatgggtgcacttttatatcctttgttccgagttctcattcccacaacttggttaaacgaaaacgtctcattagggaaaacaacgtgattgtcgattgcttttgcagaaagagaaatattgtgtgaacggcttttattgcttgagttaaaatacgtcacgtactgaccaagctgctgcgtactgatgtgagctagcagctcgctgtcaactttcggataaatgttcatttccggcacttctatcttggagggaccttgcccataaaaatacgcataaaacttttccataaacgcctgttgatacagtttgtagccaaccctgcccgggacgatgcttccatgatcgttaaggacagcatttatcggctcacggtacactttctgatcaagctgtttgatgaatttactgtatttttcatagtcaaccattggagtgccgggaagaggcattgtaaagtcttcacggttaacagtggcaatcgtccgtccttgctgtgtgaccgttaaactgtcctgcggctcactcggctgagccaataaaaaaagaccagtgatcaaaatttgtatcataagtcggtttacctcccaatcattagtatgaacagccgcttatcctttgatgtatttcttcccatcgtttgtttgaatctttagacgttgataaaaaccttcataaaagagcttagctttatgttcacaccgatccctgagctcactgaggcacacggttcattcagtcggcaagtttgaagtagttcagcatctcccagtgatgagggatgcttttttgtcttgtcaaaaatgaaaagggtctcctataacaacaaaaaatcaatccatttcaatatttttttattgagaaacgataaattttttgttacattcaattagacaacaaataaatgaggtgcttgttatgaatcgaatgtcgacaatttttttaaagatagctttggttcttattggaattccaattcttgctttatgcatttttttagtgcctaaggtagccaactattcagcagaattatttccaaatatcgcttatataaaatatctcgttttcatctatttgtatgtaacggcgatacctttttactttgctctttatcaagcgttcaaacttttaagctatattgacaaaaacaaagctttctcgggtttgtctgtaagagctttgaagaatataaaatattgcgcagtcactatcagtatcttttacgcagcaggcatgcctgtcttttatctgatggccgagatagacgacgccccgggtatcattgtgatcggattggttattatttttgcttcaatggtgattgcggtctttgctgctgttcttcaaaaactgttaaaagaagcgattgatataaaatcagaaaatgacttaacggtctgaggtgatgacatggcgattattatcaacattgatgtgatgcttgctaagaggaaaatgagcgtaacagagctttcagagagagttggcatcaccatggctaatctttcgatattaaaaaacggaaaagcaaaggctattcgattatcaactttagaagcgatttgcaaggctttagaatgtcagcccggggatatattggaataccgaagtgatgaagacacaggattcgtaaagaaaaaatatgaaggatcaacagaaaaataaagtgattggcggtgagcttatggacataaacttatatccatctagctgctatactaagcgtccctttcatacacgaagaacacaactatggaggaggcatacatcatgagagccataaaacaaatcgtccattttggctgggaacaagccctttcatgtttgtttcctgccgttatttttgcctctttggctattacgcaaatcatcccactgcccttcttgccgcggtatgactggctgctcattatctgcgttctcatgcaattgtggatggtgcgttccggtcttgagacacgggatgaattaaaagtgatcacattattccaccttattgggcttgctctggaactttttaaagtccatatgggctcctggtcttatccagaagaaggatactccaaaatatttggagtacctttgtatagcggctttatgtacgcaagtgtagccagttatttgtgccaggcatggagaaggcttaaggttgaactggttaagtggccgtctttttttgcagttgttccgcttgccgcagcgatttatttgaattttttcacccaccatttttctatagacattcgatggtggttatcagggcttgtcatcattgtcttttggcaaacatgggttacatacgaggtgaatggagctcgttaccgtatgccgctcgcactttcttttatactcatcggattttttatatggatagcggaaaatatcgctacgttttttggagcttggaaatatccaaaccaaatcgatacatggagtctcgtacaccttggaaaggtaagttcatggctcttgctagtgattgttagctttcttatagtagcatcattaaaacaagttaaggagcagagtcccacaaaggcagagatggatgaatctttttcttagcatacgcatacaagctcccaaatagagtgaaaagcaacgttcaaatggttgcttttttcttttatgtaactctgccggtgagtattcatcttcttcaaatttcatcgcaacacgataactgattcagattacaactgctttcaacactttgacaaactcatgcgccgccggcgttatctcttcaaatgaatgtgcgatgacgccaatatcgcgtgtgaccctaggaaagatgtcctttttaatcaattgatgcgggacggatgaaagtgtaaagtttgaaatgatgccgatacccaagttatttttgaccatattaatcaaggtttcggcattttgcacagttaagttttcctttaattcgatgttgtattgcgaaaatgcgtttgacatcgcgatttcatgaccgcctttacaaaaaatgaggtcatcttgatatgtttcaaggtcgacatgcttttcaagttttaattcgtcacgctgcggcgggatgacggccaccatatagtcgttacacaatagctgattttcaaacggttcaaatggagatgctgcgatcccgatatcaaccgtccgatcttcaacccatccttttatttggtcagaggttccttcgatcaattctatgcggatcagcgggtagtttgatctgaatgccgcaatcgcctgtggcatgatatttgttgaaactgcaggaaatgaaccaattttcaccttcccgtttaacagcttgttttcccggttggctacttgatatattttgctttcaattcccttcatttgcctcgccagcagcaatatttcttttccgatgtcagtcagcattaaaccatgatgtttatccctgatcaataatttgagctgcagtgagctctccaggttttttatcgctttacttaccgccggctgagagatgaacaattcttttgccgcttctgtaatatttaatttctccccaacttttacaaatatgtgaagatggttcatgttcataaccatttggttatacccccaataataaaaatgtatttcagttatacataaatgtaacatatgatagaaaccagcacgatattttaacaagaaaggcggcttcattatggtaaaagttatgctgggaatcatatctgtcacacttatttggggttatacttgggttgcgatgaaagtaggaattcatgacatccccccgcttttattttcgggtttgcgcctgttcatcggagcagttcctttatttctcattctcttcatccaaagaaaaaagctttcaattcaaaaagaacatctcaaaagctatatcatcatgagcctgttgatggggctgggctatatggggattttgacgtatggaatgcagtttgtcgattcagggaaaacctctgttttggtatatacaatgcctatatttgttacggtgatcagccatttttcattaaacgagaaaatgaatgtgtataaaacgatgggactggtctgcggcctcttcggactgttatttatatttggaaaggaaatgctcaatatcgatcaaagcgctttatttggggagctgtgcgtacttgtggcagcgcttagctggggaatcgcgaatgtgttcagcaagctacaattcaagcatatcgatattattcacatgaatgcctggcaccttatgatgggagccgtcatgttattggtgttttcctttatatttgaggcggtcccttcagccgagtggacatatcaggcggtgtggtcattgctgtttaatggcttgctttccaccggctttacctttgtcgtatggttttgggtgctcaatcaaatccaagcgtcaaaagcatccatggcattaatgtttgttcccgtattggccctattctttggatggctgcaattgcacgaacagatcaccatcaatattatcctcggcgcactgctgatatgctgcgggatttttatgaatacatttacattttcacgacggaaagtgtgaatgatatacatttcccctgtcatttgggcttcatgtgacaggagaagactattacgagaaagtcttctagaatcctgacgacagcctattaaacaatgaaaaaagctaatgtctgcatgtagacattagcttggctggcgtttaggctggtgagaatccagatacttttttattaccattctggctgatcaaactgaaaaccgtatagaccttttactttaacatctccgcaatctggatcttttgtcaaaatcaaataatgagtcttataaggcatcgtctcaactcgatcagttgcactaaaatcaaaatgatcccccgagaagtttttttcactaacggttatttcatatcctgacaaagtcattcgcatgattcttgcgttaattgtacatccttcagtatcgaaaatggtgaatctgtacccaaagtgagatgtccaatggtttgaatttaggtcatcagacttcataaaccatttttcattctctgtcattgtaaaactcactttctcctcatctttcacgataacggccgaagcttcccctacatggatagtcaaagccaaaagaaatgtaaaagctaacatcaacatctttttcaaaagagttcctcccgatatcttttacttcaatatattggaagggtcttttctgatcaagacagtcttctccaaatgaatctttagcaccatgaaatgagccttaataagaacagttttaacccaaatcaacctctattcgaaataaggcttaccaatctatattctttttaaaagtttctgcatttctttatttagctcctagacacatataaaaaatgctcctataagttcaggagcactacaaaaaactgctaaagtgttttctatcgatttattgtattcattagctcaaagaaatattcaggcttttgagtcttatttagcttataccatgaacgcaatgtatctggtgcaaatacatctaattttttcaatacttctaccgcaaattccagaggagcaattcctgatgcagtaaccaaattttcatcagatactgcaggccccttttcatagaatgtttctcctttgtaattagggcagaccatattcatatagtcgaggtcattgcttgtgtgctttctcgaatttaagtatccttcattcgcgaggcccaaggttgccccacaaattgcagcaatagtcgtgccgagctttaaagcgtcgccaacttttttcaagatcggctgatgaatatcttctccccaagtgtttcctccgggtaaaatgataagatcttgactcccaagagtacattcgtcaagagaaatatctggttttatgcttaatcctcccaacgtagttatcatttctttattaacccctactgtaactacttttaaagatgctgcatcttgtttaaagtatctccctgagtttagttccgcaattaaatatccatattcccagtctgacattgtgtgaaatacgtagagataaacttttctcgtttgcatccaataacactccaatcacaattgataaagctttctaatagatgactttgctgacagtcattgtcagcttttttgttgattctattcttatgcccttgttctcccaacttataaaaatataagatcaattgattctatgtttactagcgcaaaggggtttgttacactaactgtcatgggaaacatttcaaaggtaatacaaaatcatttgaatgaggaggcctgatgaagttgaaaactaaagcgtcaataaaattcggaatatgtgttgggcttttatgtttaagcattactggtttcacaccttttttcaactcaacacatgccgaagcaaaatccatagaagacacaaacatggcaagctgtataacgaataaaaaatttgttcaacttgagaaaaaatttgatgccaggcttggtgtttatgcaattgatataggttcaaacaagacaatcgcctatcggccgaatgaacgatttgcttacgcatcaacctataaagttctagccgcagctgctgtcctgaagaaaaactcaattgaaaaacttaatgaagtcatccactacagcaaggacgatcttgttacatattctccaatcacagagaaacacctagatacaggcatgagcctaaaagaaatctcggaagcggctatccgttacagcgataataccgctgggaacatcttgttgcaacagcttggcggccctaaaggttttgaaaagtcactgaaacagattggggatcatgtaacgaaagctaaacgattcgagacggatctaaactctgcgattcctggtgatattcgtgacaccagcaccgcaaaagcactggcaaccgatcttaaagccttcactttagataacactctcacgactgacaaacgcatgatcttaaccgattggatgcgaggcaatgctactggtgacgaactgattcgggcaggcgctccaataggatgggaagtcggcgataaatccggagccggaagttacgggacacgaaacgacattgctatcgtttggccgccaaacagagctcctattgttgtggcaattctgtcaaaccgctttacgaaagatgctaattatgataatgctcttatcgctgaggctgcaaaagtcgtccttaacgatctcaaataatatgtttagccttttgccacaaaggaaaagacattacttttttaacttctaccgttcattttttgatgaacggttctttcataagacctctagaatcatatatttaaacaccacaaaattaaacattattataattaacagcaagttttcattttatggaacaagtaaagtttgaatctgacaagaattaagactaagcaccctaaaatccgttttcttttcttccaagaatatactccttagtgcaagccattataaagatacaagtgaacatacaatgcagacaactctcttaagtctcttattctgtgaccaatttgtaatactcatgaatatccggactcacttccaatatttcgtctcgttcgaagacactaacatatcaaaccacttgaattaacataactgaacttgatattggtcactggcagtttcaatgcaatagaacaacatttgttgtctcagaggttatctatatgagaattcaacaatttttttataataattcatatttttgtatcgttgcacttggtggatttgactcttttcgtgtatggaaccacacttttattttttcacctcttttgagatcatctgtgttatcaatctcacttaatcctacaattactatgttatttttaaacttgttcataagttgtccttcagaaagattgtaatcttcttttcctggagcttttgtatcggtaatgagaattgccctttcattgtctttaagcacgacatagcctactaggctctgcatctttgtttcgtctccgttttgttcatttttattgcagcctgcaaggaaaataatgagcataatgagcactatcaagcttactccgattttaggcatctttcttcctcctctttaaactcatctttaaaataaacaacaggatatcacccaacccatctacttctttttgcaattcataacagcagcatactcattctccaattcctcaaccttctttttattctttctcaaatatttgcatgtggtagccctcgatattatccgcttactcatttttgcgctttcaaatatattattgaaggccgcttctttctggattccagcataaatatacttatccttactgtcgtttactatcgcaacttccattaaaatcgagatttttactttttttatgatccattattcacttccaaaataacttccaattacaacataatatatgtataaattgtaaatggagttgatgtaattgaagattaggaaaatcttattgagttctgctttatcctttggcatgctaatatccgcggttcccgcattggctgctggcacttcgtctgaggttgcagtaaaaaatgaagaatatgattatgacactatataccgcattagtcctctgccaatggacttccagccaacaatagaatacaacggttatacttatacgcttacacgtcattattttgattactcaatcgggttttacacggctatttatacaaaagttgtttaaacttataaaggagctttttagctcctttttctcttgttttaagcaaggtatttctttctatgtggtcccctatcaaatacaacatcaacattctccagttctctttgacacgaacaaaatctaaagtttggttttaaatgctggtaataaaaaattcactttaaagaagtgccgcccgcaaaatacggcttttgtacactacgccaattttatattgaaaagccagacctcctcaaagaggttccagcttttcttaatgtgctatcgatcttcgttagttcaacgggaactttatcattcggtacaaatgcagcctcccaacttctagttagggctgatggcggaatatctgacggttctctacacacatcagacattagaagatttcaatgtagccttctgtaccatgaacgcgaattcgttgcccatcttttatcagcttggcagcattttcaacgccaacaactgcaggtaagccatattcacgggctataacagctccatgggtcatcagccccccaacttcggtgactaggccttttatggatacaaacaatggtgtccagcttggatcggtaaaggaggtaactaatatatctccatcttctaaatccgcatcttccatgtttaaaatgacacgcgctcgcccctctataactccggaggaaacaggtagacctacaatcgctccggctgggagattttctcgtttatactcacctgtaacgatttcaccatcagacgtgataacacgtggtggagatagtttttcatataatgtgtactcgtcttttcgtgtactgatgatttgataatccagtttatgtgtgcgcacgacttcgtgaagttcttcaaaagtgagatagtatatatcttctttttcatgaataacgcccgcttctatgagttgttcggcttctttcagtaaagcctgcttataaacgaagtatcgattaaccatgccgtattttggatattccctaaacccgctgaaattccggatgatatctatcgctcgttttgtttctttggctttttgttcaccatccggtaattgcttcaatcgatctaataactcttgttctttcttcaaagcttcctgtcgcccttgctcaaatttccgatggccgacattaggctcaaaatttttaatattattaagaatcattgggacaagtgtagttggtttttcgctccatcgagttcttgtgatatcaatctctccggtacatcgcattccgtatttgctgagataatcatagatcgcgtctcgggttttgcttccgccatcaaacttagccagttcatccaaaaagttatcatcttttacatgttgtaagtaatcaattacctctggataaggacgaatcacatctgcgacgtctaatagcgcaagacccatttctgaagtaatattatggggtacagattgagaaagcgtatctgctgcgtttttttcacctaaccactcgttcattttttcgttaatccataatgaagcattcatagcagttcgaattagaaccgaactttttgggttaaataaaatcttctttaattcctgaatatcttccagaataaaacgaaataaatctgatcctgatttcgtttggatgttttgttttaactcttctatcgatgtttgactgctctcaatcaaatcagacacgattgtcggatcgttttcaacttgagccggcatatctgcattgcctctgctgggatttggtgctgttttatcatttggtatcgactttatgaaatctcgtcgctttattatggtcataagtgcgtcttttaagagctgatcgtgctgccccatgccttttaagaaaacttctctgctgtcaggggatgccagatgatgtgtgacatcaacaaatagccttccaccggctttacgcatgggtgcaacagtcgtcaacagaaaaaaagacaatcccagtggttttatgggatccgtcatcatttgttgatgaccaacagaaatatagacgtgattttcttggtcactcgcttcagggatggggaataaagtagtgattggacgactctgtacaatataaaaagtatcgcgggccaaacaccattcgatatcttgcggctggccgaaatgagcttcgatctgtcttccaatgcgtgccagctgtaaaatttgttcatcagtcagtgtttgagccttttgctgatcagaatcgatctgctgtgtttctgttccgccttcttttcgtccgtagatagccatttttttagttgctattctcttatcgatgatttgcccatcctgtactttaaaacaatcggcagataccaagccagaaaccagtgcttcaccaagtccaaaaccggcatcgatggataacacctttcggttggaggtaatcggatcagcggtaaataaaatccccgaagcctgagggaaaaccatcctttgaacgataacggataaatagacttggctgtggtcaaatccattttgcatacggtaaataaccgcgcgatccgtaaatagggacgcccagcatttactgatatgctgcaagattgcatcgacgccggtaatatttaaataggtgtcttgttgaccggcaaaagaagcatgtggtaaatcctcagcagtcgcactagaacgcacggcataggcatgttcctcgccaaactgggagagatattgagccactgctttcacaacatcggaaggaatgtctacttccataatgatttgccgaatcttccggctgatgttaccaatctgatctcggtcctcaacttttagcatggtcaattgatccaacaacacttgtaacgtttcgttttgttcgatggctttttgatatcctactgttgtgacacaaaatccttctggtacttgtataccttgaatttttgataattcccctaaatgtaacccttttcctccaacgagcgaaagctgtgttttttcaatttcatgtaaaccgagaaccaaagaactcattctacatctccccttcaaaaaaaaatattgacaagagcttcctagcaggatataataaaattataagatggatatctataactttttaactagaaagcgcacgtagtgtgattatatcaccgtgtctgtttttgtgcaatataaaaagaacctgggaaatttcaccaggttcttttcttaatttccatagctagtcgcattaaaaaacttggtttgagctgattcaatcctctaaggaaatcctaaagttgggttctttttgaacttacttgctttgttcgtagagtccccattcataaattggactttttgttcttaacagtcccacctttaactagtataaagttatgaggatctggttaactactagatatttttattttgaataaggcttatgtttgataaagaagggttatgtaaaggtgtctgttgtgagcaagcgctgactacaaaaaattgatagcattctcatttaaataccattctattaacctatagggaaagttttaaaaccagatggagaataccctacctccagcaattccaaggccgttcacctagtagaaaacaacctttaaccattactaacgattttaataatcattgattataaaacttctcaaggaacgatcagcagcccgttagctacccctgattaaggatgatctgttaccacactgttacgttagaacttccactactttgatatccttctgtcgccatgacttggtaagcccaattactgcccagattcattccatggctcttccatgcgttcacatgattgctgaaagtgattgtagcgttgcttccggttggtctcttcgactggcgaacactccagtactgcgtaaaagtagtgcgatcgccatcaatggaaggtgcgttataacgtgtagttgtatatatgtcatatgtacccccatcactttttacagtacctttatacgttccagtaggtctataagtaccccatgaatccactacataatattctatgagaggtgatctcgtccaaccatataaagttaaatatccattgccattcggcgcccaaactccggcattatagtttatcgtcctaaatggcgaacctgtagtccaacctttaccaacaacaaaatttccggtattagaccaattaacactgtaattcccgccagacccattgacagcgtttactataccgcccccatcagtccaattttgccagtagtctgtgctagctgcagaggcggttgccgaaaacaagctaatactcattaaagctgccgataatccaactaagaaattctttttaaacttaaacatatgttacctcctataatattttttccgactttgaggtagcactcgtatacatttaaaacattcttaattactaacgccaaagcttttgatcgtccccttcagtataataccacgaattcatgagcaaatattaaaagtatttgtaattcaattacaaatacctagaaacacattataagtggtcttcttccaccatatcctgatccttttttcgcaggatcacaattcttgtttctaattcagatggagtaatatctgcaatgaattcccattgaaccatttcaaataaaggagatatacattagagattgtgaaattattgtagctgccgcttgtctaatgaagggaagcaaatttatgaagaatatgaagaactgaagaagaaaacaattaaggttatactaagaaagaactgctcaattaaaattattgaccaaatttgaggatgatagcttagatcagttttacaaagaagttgcaagatttttatttgaaagggctctgaaaaagaaaaaaaagaattgacaatcagggtaactgtgggatgtaaccgagcctccaattcaaaataaatatctttaactttctttttttatttaaagagggactgtatatccctctttaaaattaagctttagattgctgctgaaagtaataaaaattgtacttttgatcaaacccttcttcgctaccacaaagaaaaataatgaattcaataaatgcgataatagaggggataccagtccagcaaaacaaaatatatagaataccttgtcctactcttcccaaataaaacttatgtattcccagacccccgaagaaaaatgctaataatgccgctacaattttgttcttcttgcttaccatgacttcctcctagttcattgctaccatttttaaagtaatgctttcacattataatgcattttccgccagaaatcgtgaaaattttgaaattcttttgagattttttattttattgagaaatgaaagctcatataattgaactagatggttttgggaggcatttattcaaaatgtattgccaaagattacggcaattacgaaaggcacacaaattaacaatggaacagttagctgagaaaattggaattgcaaaatcaagttacggcgggtatgaagctgaaagcaaaaaaccaccattggacaagttggttattttagctagactatatgatgtttcagttgattacatacttggattaacagatgatcctgatcctaaagtggaaagaaaaaatctaaaagagtttttagaaaaaccagatattcactgggatggatataaacttacccctgagatattagatcctatacggaaaattttgaagttggttactgcaaacaacaattaaaaaagccctcataagggcttttgcataaaacaattatttcattgaattttctggactcatttcaagaagtttattcatgatgatagctaaactttcaccagctttttgtagcttctcacctgcttttatcagagtaattaaagcacttaaaaagtccactaagctattttgatttattgcaactgtttctttataagctttgtaagcttcttcaaactgatcaaattgcacacctttcatagcaacaacagctaatttatctgaaatatttccatatgactctgttaaactaaaaaatcttttgacattgattagtaaggcaatgcactttaaataatcgtgccccagaccaatatgtaaattgcctgcagcaaacagcaaatcgttcaaaactgtgtacggttcaccattccttgcaactgtctcaatccctttgtataagtataataaaaagacaaatgaatttttatctgtggaacgctcaggtaataaggacactataataacttactttaagccaaaacatccaaataaaaaggctggttataattattataaaaatcaataggaactataaatatataaagagggattgctatgccaaaattatatacatgtttaatttgcggatataaaggattaattcaaaacccattaaacaatgatggtgagtatcaaaaaacatttgatatctgcccttgctgtgattttgaatacggctacagtgaagatcatgacgtaagcttaggttttattgtaactccagattatttaattgacgctgcaattcagttataccgaaaacagtggattgagaatggaatgaaaactgcaaatcctgaagatattccagaagaattaagaaacggtgactgcttaaaattcgaggtgttgttaaagcaattgaatagcctaaatctcgatactgaaaactttgaaatcaagggatttaatggttattaagcagatccaagcccccatatgggggcgttcttattattgtacagtctatcagaactatttatagaaaaactatttaatgtattgtataaatatcactgaccttttctttctccattcaacttccttaaccctcaactgtttgctgctgcatcacattcctcctttttgatttttgtgtatcaagcctgtacaatattcaaaaaccctaaaggatgatgaacatgtgtggcaagttcactttattttctgagtttgatgacatcattgagcaattcaacatagatcaattcttacctgaaggtgaatatcaccctagctataatgtcgctccttcacaaaacatcctgacaattatcaacgatggatctaataaccgtctgggtaaacttagatggggtcttatccctccttgtgctaaagacgaaaagatcggttataaaatgattaatgctcgtgctgaaacattggccgagaaacccagctttcgaaagccgctcggaagcaaacgttgtatcataccggctgacagtttttatgaatggaaacgccttgatccaaagactaagattcctatgcggattaaacttaaatcgtcgaatctctttgcttttgccggcttatatgaaaagtggaacacgctagaaggcaatctgttgtacacttgcacaatcatcacaataaagcctagtgagcttatggaagacattcatgatcggatgccagttatcctaactgatgagaacaaaaaggaatggctaaatcctaaaaatactgatcctgattatctacaaagcttgttgctgccttatgatgctgatgacatggaagcatatcaggtatcttcattagtgaattcacctgagctcattgaatcccattaagtaccactgccatatcgctttatataccacctcctcttagctaatatgttctaagtaggaggtggtattttgtttgtatctccaatgctattgcattcaataaaagagccttttgatgacgagagctatatcactgagcttaaattatcaagactaaaattaaaataagggctcatacatagttgatatatataatatgtattgagacctttattgaacaaacgccccgtttgttaaagtggaaatctctataattaatagccgacttttaaaagttccaatctaaaattatcctctaaatcggctagcttcattaacttctccgatatacctttccaatctttatttacagacatagaatgacatatcccaaacaccttagcctgttcagtcttcaacactgataaatgtgaatgcctatctttaaaatacattgcataatcgttggcccttcttgcacttaattggaaaaggaagaatgttgtatgccttatagtatcagctgtaataggggcatttaataattgatcagcataaaaacaaattgcttcccttccaattaaccctatatccactttttcgaatttccgataagttctcttaaaataatcaattgctctctcgtatatttcgttattgtctaatgtgacaaccttttttgctgtagaccaatatttattgattcctttcctatacggaatcctttccgccatccaagccttcttaaattggtccagtgataatggaacaaatggaaagcctgctggatcttgcacataaatattttcattatccatttggtaccctagaacataatggtcagaaccatttaaatttttatgattcggatggtatgttagctcccccatatctaaagggcctagaatgacagggttttgtttgatttgctgttttaataacggaaatgggtcatctaagtcactagcttgctgatgttcttctgcagtaaatccaaggatgtttaaagcataattgataccatcatcaggatctctcatactaaaataaaggtttttttcatattctatcatggcacctaacccaacaccagttaatatctctacaagttgaggagatacattttctcctattgatgaaagaaacattgcagttgaatttgaataacagtaatggccatttcctatatacactaacatcacctccgggtagataagttaaccttacaattttgaaaattgaaaatccatattaaattgctccgttctcgtattcatcatctggatcatttttatcaacaataatgatcttctcgccaatctccgttttacgatcgacctctacgtattcgcgcttgatgctgctaagtgtttcgtcagccagtacgtgaatcattacagttgagttcgctttaatttccgtcatttactgcaccctttatattttttttatgttttttcaattctttttagattttcatattggatttcactcttttaattatagaggcgtgtcatacacatgccatctaagagagataggacaattttgtcttggaggtgaaagctaatgaattttcttcttgatctttttacaaattggacttttgataaagtcctggattatacactagctgctgtaatttggtctgtatttaaatccagatcaaagcagaataagtatccaggctatttcgagaaaatacgccgctatagaaatttacatccccttctgcgatcgttatcgatgcgtgtacttttatcgataacgatccatccttatatgtttagttaaaaactatcttttatttagacttaatgggataaaatcttcattgtaaaactcttcccactcagcaattaagtttctataatagttttggttagagtcggttggcatagattcaatattgtcaaaaccattaataccgacatctaattctactgtcactaatccttggtaaaacttcttataattctttttaattactttgaaaaattcaacatcaaagaagtcttcatattcagttgctccactccaagaatcataagaggacttaacacgataattaaaaagaaccaaaactaactcatctttcacatcttttgatatttgctccattaattgatttagtccttcactggcattaaaatctacaatgcttaatcggaagtcaatccaagtaacagcttcatcttttaaccttccttctccgtcttcattcacttcaattaatacatatctgtcagccataattccctcctaatttatttgtttaaaatcacgattttaactatttatgatccattagtcacttccaaagcaacttccatttaactcataattaatatataaaatgtaaatggagttgatatatttgaaccttcgaaaaattttattgagttctgctttatcattaggtatgctggtatctgctgctcctgtcttggcaacaagttcttcgtctgaagtgatagtaaaaagtgatgaatatgattatgacaccatatatcagcttagccccctaccaaacttcaagccttctattgaatacaatggatatacttatactctcacacgttattatttcgattactcaattcagttttatacggctatttatacaaaagttgtttaaacttatagggagcttttttagctcctttttcacctttttaagcaagatatttctttctatgcggtcttttatgtatgaaatcaaatgctttccctaattccttctcttctgttaccgctgagtccatatcttatattgcatctaaggtttagtcagtcgagatcattgaatatatagtactttactcagaacattttgcttattaaggacataataagtgttcgtattaatttttcctgttacgataacgatcaaaaacaaaataatttatctcattttaagacagaagttattctgctttttcaaaaaaatattcttgattttcccttttttagatgcatccataaagcattcgatcataaccattatatgtaactgaaatgcaggtataagagttattatatagggattacactaccattatctgggggtgtattaacatccaaatactcaaaagcaagaacaaatgtacccatagcacttccatttccacaccctatccaaattttcattttcctaattccacatcaaaatcaccctttttcacatcgtaatcactatcgtaaaagcctatagtatcaacgtttttccttcttaaaattttctttttttataaatatcttcccaaaacaaccactttcccctactcccgcttatgttttacgatcgtttaccccctatttactaattaaagtatcaaaaattcttatgtttactgtctttttagctcattataaatttttacgataagcaattgcctttgcttttggatatgacttgactgtatttggtgacgatttaacagagaaatttaatgctcttctgacttttttaactgcattgggcattattgttgatccaacaactcaaggtatttctgatagtgaacaagcaatggattatgattcaccgagataaaccccatacccttctcttgattgaggagggtatttttttcgttttttcaaatgaaaaaattgcagaaaactttacatccttttacaattttttcaatgactatgttatgattgttttcgagagatttttgaaattttcagaaagaggggtttaaatgagtaagatcgcttctgaagttgtcgctactacactgaatgactggtacattgctataaaaaaacaaaaggttgatgaatcaataaaatattattcagagataaagaaactttttgatgaaatggaagaagatcaagaagttcttgcgtattatagtctattagaagaaagacataaaatgttgctgcattcttcacgaggagagcctttacaaaagcacacctattttactgaagacaatcaaaacttcataacaaaaacaaatgataaattagaatacaacttttatttatttgaagcaatgtacgaggcatacaacaaaaactatgatcgagcaattaacctatatggattagctgagaaaaagcttgcagaaattccagatgaaattgaagcagctgaattttactctaaagtctcttacttatatactcttgttaaacaaagcattgtggcacaacattatataaaaaatgcaatttcaatatataagcgacaccctgattataaatgcaaactagctacatcaacaatgattgcagctgcaaactatgctgatatgaaacgatttgaggaagcagaacaatattacttagaagcaattgatattgcaaaagaaacaaaagatgaatttttaaaagctcaattatttcacaatcttagtatcgtttattctgattggaacaaacctgataaatgcattgaatctcttgaaaaagcaataggaaatgaatcttggttacattcgatttattatataaattctttattcatgatgattaaagaactctttaaaattgacgaaaaaatgaaagccattaatttttacaataaagcacaggaaagactcatattaatggagaataaagtatacgaagccaaaatcagcatcctgtataacctttattgtggggaattaaaaaataatttcaataattgtattagtaatattgagtttttaaaacagcaaaatgaacttgaaagtgtagatgaattgtcctacatagctgcaaaaaggtttgaatcaataggtgcttttgaagaagcaacgagctttttcaatgcgaaaatttgggctgaacagaaaatgaatcaggtggagggaatcttatgaaaaaacttgtgctttgcgtatctattttagctgtgattttaagtggagtagctttaacgcaattgagtacagattcaccatctaacatccaggtagctgaaaggccagtcggaggttaaaaaaggttgattaattaatttagccctactcaaacatttgagtgggcttttattttatgatttatgtccaccggtcagccctgctctgtggagcgcagtacctgcaaacgtaactgagatacttctcactgttttttgcccgagtaaaacttattaaagaacatcaagcaacacttataaatatccatcgtgatatttgtgggaaaatcaattgttttggatcgatgaaaaccaccgccaagctcatctttactgtatccaattcctagacttattgttcgaccaactttattatatgtacgtgcccttcttgcgacttcctcacaaatctccaagagcacagctttaatctcttctctctttgtataatccctaaacaaaatctgactcttaccaaaactaatctgcccctgcatcaatggagctcctatttcagataaatcaattccgtgagcatgatagtacaactggtttcccattattccgaacttcttttcaagcagctctaaaggaaatttagctaactgacctacagttgatatacccattcgattcagatttctttccatcctccctcctatcccccacattttagacaaaggtcgaactttccagagtctatttggcacatcttcatatctccaacgtgcaataccactctttgttttcttactctccaggtcaagtgcaagcttactaagcaacatattgtcaccaattccaactgtgcacatcaaaccaaattctctccacatgctgctttggattgctttggccatttcttcaggattctcttttcctgcatctaaaaaagattaatcaattgaatacgtgtggacacatttttcaggaacaaatctgtaaaacagctttgtaatctcagttgaaactctgatgaaaagcttcatttgtggatttacaatgtatattcttggatcttcaggtatctcaaatagtctcgatcctgttttgattccaaaatcttttttaagtgcaggagatgcagctaacactacacttccctgtctatccgtattccctacaacggcaagataacatgttaaaggattaagccccattgctacagccgatacagaagcataaaaggatttcatatcgacacagagtatattctcacgtggaaattgtgagtaatcagtcattgtatataactcttatgatgttattcatgttgatataaactgtattgtcgttctggtcttttacgtgaagcttttgttgttcaaaattaatgtaatgtactctgccggtaacattttcaacaaatcccttgttaaagagtttgaatttcaactctttattaaattccaatgcctcagaaacgagaatatccatctcatcaatttgtttgtcatctaaagatggcttttcaacttttgatccatcaatcaaatcttgtttaagctgtattaattgttctagcatcattgatgtccattgatagttcctcgatccctaaacatatcgactcactccttgattgatctaatatcaacagaacaaacgttccttattcaatatagatcagaacaaaagttcgatgtaaatgttggtaataaaatataaaggtcaataatgatatccgtagtattaataaaggagagattcttttcgacgagggagagtgtgatggtgaatgaagaagaggttaattggatttttggtcttagttcctgctttgattatgtggggtataactttaatcgaatcaaacaaaaagacccctgtagaagttttagaaagtgcttgggatgaatttgggttatttagttttgaaattggaataacagatccggcaattacaataggcatggatcaaaccaaaagtgaagcaaaactccgtgaatatttaaaagataatctgtctagagaagccaaggaaaaatataagatttatatattcaaggatgatactgataagctggagaaagagcatcaagaatatttgaaagaaaataatctcaataagtaaaacgcccagcaattaaaactggacgttaaaaaacattagttattctttatttttttttagtattcacacgtaatctctctctatcttctttaaaagaggatatgtagtttttagactctaatgcagtcaccaacgctttattagttctattatttgagatctttattcgtctgcctttttcagcaatttcagagtaaggttcccctattttagttaaaaattcagtaattgattcattatcaatatgctttatttgtccagctagcaacgataacctagtatccaatgttgtaggtgattcaagcaaaaaggttagtagttcattggtgattttcaggttatgctcattaataaaataaattgtatctttaagaatatcattatttccatctgtcaaacagttagaatttaaatgttgtacaaatatttctttgttaaattgagagagctcgttgctatctatgagttgctttatatcattggcatcaagggaaaaatcaccttgtttatcaataaactcgtcagggtttctcaaagcgagttggatatgaagtgtatcaaaatttaattttaactctttaaaattttccggtgttagagataacaaatcattatcaatcaataattttgctcttttttcactaacatttccgagcggaaagtaaatccaactttgaatactagcaattaacacttcgaatgtttcgtctgtaatatcccgactattaatgatttcttctgagatatcttctaaaatcgcttcgtcaaatttatcatcaaacgcctctatattatttttagagagctcttttctattaacaggattgtttaagaaagctattaagaaatcaggcatttttttattgtattctacataagaagtaataacgtttgaccagcatgcaaccattttattttcacggatcacaattggccataactctttaatcaattcaccaatatccgagatggcaaaagtttttttcatgatcattgcatgctttactctcttatctaaatcctcccgatttaataactccagaaaactttcctctggttcctcaatctcctcagtaagtaaaactttttcaacaaatatatcaatattgtcatttacgtaattgataacagcctgctgatcagagtttttaactgcagcatacgttatattgggagcatcatttaaaataactgataaagttttgatattaatttcgtatagatttcgttgaacaacaaagtcatatattgtttcagaatttagcaaatgatccaaacttttaaatttaacttggagttttaatagtagttcttttattttctcctcatcagatactaagctgagaagatttaagtacttggataatgtgaaagacatgaccgactctttattcattcggataatatcagctatatcagcatatgtaagtatatctgacaagtattcctcttttttctgttgtgtataattggatctaagttcaataaaactccaaaaatcatcccatttactagatatcgattggataaaggcagctttatttattgccctttctttaaaaccatctatgaatgtaacagattctttacttccatttgcaagtcgctcaattatgctatcataataattacggtattcagaatgatccattatatagtttaagagatgaaaattaagtacctctatttgcttaaattcagcaccaactaatttgctcattattttaccgatattatccagctcaaagctgtaaggcaatgactcgtggtttttaatactaaatacaaatttaatatcggaaagacttaaactttctggatagaagtaagtgatgtaatggttatacatttcatcaatatatccatgacgtagcaggtaaacaagtaattttttctcgtaaagcttatcagaaaatacatcctttgaattcatttttgtaattaatacttgtaaagattgcgctcttatttcttgcttttctctctctaattccaatagttctttcttgaatttttggatttcatttttctctatagccttgatggcatcttctctttcaaagtagttcggtttccgaccaaaaacagttgcaatttctttaattgtcgctggaccatttctatttcttaaataacaatagatagtatccgcattttttaacttctcaaaaaaccgatctttattagatgtattgcctctaaatacctcgccatctatattaatatcataattagaattcaaatttgatatttctaattcgctcaagtatataaaatttaattcagcaattgattttaaagactcaacttctatattcgctaatttcctctctaattgttgtattttagcattaattaattttatttgttcctcaattataagttgttttttttgaaagatttcatataccaaccctttgttatattgtaatttagaaaaatccacaggataaatatttttgtagattatcattgctaacattttgttaggatcaagatcaattgcacttagtttttgttggtatataacaaattcattaaaaatattctttaatactctcatgtcatcaatgtaaattgttacatcctctaagaaatgagtgtttatcaaatcagaatatggtgaatgttttattttctttttaagtatgtctcctgaattagatgcattaataattggtattactgggataataaaatcaaaaaattttgtgcggtctctagttaacttttcagtgtctgcatctccaaaaatatcatcttttatcgcatatataaaaacaacacgtctatctatttgttctgaattatttataagttcatttaattctcttaatctttcaaaaatacctatattattaaagcgatctaagtcctcaaatattacaacattatacttggaggcttcaaaaaaatataatatttcatctaaatatttatcaaatatagaagagttttcttcccctgtatttttttctaacgttgtattagcaattgtaaccttattcaattttaagttggcacggacaaaatgataaattcttttatatgcgagtagaggatatactataaagaacagtgctaataatatagtcagtcgtatttgttgctgatcttcagtaccgagactccttgaaactaacgtctcagcatatattcctttaagtgcatcaggtttaaaaaggtagatgccaactataataaatgcaaaaaagaaaatcaaatttataattatgctcttagtccttatatgcttaattcttttaaacctagaaaagggaatggttctatcgtgtacccggtatatcatttgttgcaagatgcttttctctaacttattctccatatcatccgtatctgtgttgaatgtagctaaggatatatttaagaaactatattccctgctgtattgtttttgaaaggtatttaatatgctactttttccagacccgtagggaccagttagggcgatatttttcacttttttattttctaacccccaacttagtgctttagaatattttccatcagtgtcgacatcattgctaggagaaagatcttcaaaaaggctttcttccttaacattaggttcttttagtctaatcagaagtttctctaaccactgcacaaatttttttttgatttcccccaaaaaaaacaaatcctttctaaactttcaggtgtaatacgaattaataaaactggagcaaagaactaaataaatgagtatgtagcaatgacaaatcatttctcttccatctaatatagtcctttatcgccagttgaaattcactattaattgtaacatgaaagggcattaaaagtttctgaaaaaaagatgatcaataaacaacacagcgcccaattacaggactgtttcatatttaaattgaatttttataagcattaattgcttcatttcgcagcagcatattatctttgttaaccatgcctaagttgtaagcttttttgataatatctaatacctgagaatctaacgccgaaagattaccgcctggattaaatcttgatttccaataatctaaagaattatttaggtcaagtgagctttttttgttctcgggtttaactacttcatttttctcaagtgtttcacagaattcactaaaaccaatggatctactgggagctgagttatttcccccgtatccttctgtagccaagctgcaaaatgctaagaattttggatcataaataagatcgcttcagtttacatttaccactgataatcacaatcctctcaaagctttttataattgtagcaccttttccatttttacacatattaaatatcgacaatcattcaaatgatttaataattgaatacaaaaaagaacctgcattttgcaagttcctttcacgttgtcaatatattgtgaatttttaacgacaagggcatttatgtatagtatgatatttcctgtacagtaagttttgctcactcgagggagtcttgctcatcccctaatgaaaggggtgatgctatgtcaacattccaggcattaatgctaatgcttgcaatcgggtcgtttataatcgccctattgacgtatatagaaaaaatagacctcccttgagcctcagaacctgaagggataggcctacctagaaccacatcgagcaagccctttgatgggcaactttttgtacagagccggggtgttggtagcacctcggtcttttttattttatgcatttctcattaaagaaatgcactgtaatgtattgtaaaactgattataacacattttccgtgaaatgcattacaataaacctcaagagacttggaaagcttttttattgtttcttgtaacgttataatgatctaaaatagcgcacaagcctttatacatcttcatcatttcttactcttctagctcgtctttcaacattccaattcccaatctttccccagacattcttgttagtccatttccctagcttagttttatcaaaccattcctgaaacaaagatatttcatctttcctttgcattgtatcttttaaaaggaaataatgtattatccaaaagatataaagagctgaacaagaaagtccaaaaataagtttatttacctctaaccaatttcctaaaacttgttcgcctaaatatttatcatatagaaggggtataaaagcaaatgctgaagcaccgacaaaaaaagctagagtttctttaaaccatctaacaaaaacaaaaacagcgcttaaaatataattcgttctaaaaagaactttataccaattataattcttgtttagagtaacaaatatacttctatattctttattaactgcttgatctaacattctcattttataaaataattttttcctattctcgctgttcttgtttaaaatatactctctgaaacaatcttctgtattcaaaatttgatctatcaataagatgtttctaagttttgatagcttcccctttttcccactatattcttcgaaaaatttttctataaggaccattttatggttttcatcttcttcattctttatttcttttagggaataatacataggctctaaaattttttctaatgtttcacctgattgagagtagaatcgttctatacttttttgtctttgattgaatagcaatgcaactatacccgtaattactgcagtaagaataccattttgttgtatccaattccaaatatctaataactccaattaagcttctccccttctctctgaatttacttttaatacgggctaaaataaaaaaggtttcatataaaacgggactagaaaacttctgtcactttaattatttaatccaataaaataagctctcattgcgagagcttattttatttagattgaggatgtgcaactcaagccttctattgcgctatagcaatacttttgcttaatcgtcccagtcttcatcctcatcccagtcatctttcgcttcctgaatcttattataaaaaaattcaataaagctgtctgcaacagtatcttgataaccaattaccctatcccattcaactacagggcattctccgtctttcattttatttgtatctagacagtaagcaaagtaatcaacatcttcaataaccacaagtccatcagtaaggccatagtgttctttatattcattagttctatttacaactgatgcatgatcaaagttgtagcctaaaaccaaaacgccgaataaaccaccagcaccgtatttttctaaaaaccatttataactgttggggagatcgcattggaggttttcttcaatgcgaccaatgttttcatgacttgcaccttctgtaaatatagcattttgtttattttcattaataaagttctcaaccttcgaataaatcatataaacacctcaattctcattttcaaattgtttcgctctccatttccaatatctctttctaaagctctcgtattgtgcttttaaaaccttatcatttctaaaactttcaccatcagacttaagctgatgaatgacatcactatattttgtatgtaagctgttcgggatttcaagcattgggccaggttcttcttgaatcaagtgatgtaaattaatctgtgtaccgtcttttgcataaggggcattcccgtttttcattagctgaagatttgtaacaccgaattctgttttttgattaatatcaatatctttcatagtatacactctacggcttacatctttaactttccccttcgcctttaccttcccctctatttcatatgcatcatacttttctttatttagccaaggagggcttttcttttggccagtaaacggttttcttgttccatccggtattttcttcgcattagtcaaaagttcattcttaaggttttggctatcaaccacattgtatggcacgttatctgctagagcaagcttatacttagggttgtaaggcagcaaatctggaatcttaacgtccttgattttcttacctgcttgacttgctttatttattaccttgcccgctgcatctgctttgttaatggctcctgcaccttttgtaccaacaacagctacagccactgaaccaatagcataggtaacccatcttgatctagaataggcatctccattcaccatatccttttgatatgactcttctattgctgctgaaatggcatcgtatgttttcactggatgcatagctgcattacccagtgctgagagtgtttctcctggatcggtgatgaagtcccatatgccggttacagtgtcttttcctacatcgtataaaccaactcctacaccttttacgatatcccaggtgatttctcctgctccttctagctgcttcgcttgttcaatttgcactgcaagctgcacttgagttggctccagattctcgtaccctactttcttagcaatctctaaatattcatcagggtcagatacaccgtcattaagttttttctttaattccttgatttcacgttcctttgcttcttctttcttcacacttaagtaagcttcagaatgcttttcaatatcgccttttttcttatgtatgtcactttctctgtacgctttagcgttatagtgaattggtgtagcgttttttcctttgcctgttgattcctgcagctttttaaagtcttgctgaataaattgttcgtttggttctgtttcagcgtattctgtttttaaatcctcatcaagcttgtttagcttatcgattgttttttcacgtttgtcatctgcagaagaaagtttgtctttgaagtcttctgttgagaatatttcaaggggaaggatatcattgatgttgtttaatatgtctttcattgcttttttctgttcagacataatggattttgattttgcataagcgttagccaactcgtgttctagaaaggattcttctatgtaagcatcagacatcttcgcatcttcaagtgttgcagacatgctgcttaagaaagcaatcttcatatcgataagatcaatccattggtctgttacgccgacatgaccatgataaaatgctttaatgttgtcagcacccttgcctgaaaattcactgtcatctaggttagctacttccttaaacgcttttttgagcttcaccatttgcgaccttagttccttatactctttggttcttttatccgcttcaaagagtaatgaatcagcctcaaataccttcatatcattctccttcctagactacttctatgtaaattttaccacagtaatctaattgaataacagaaaaagacagccaaaatgactgtcttatacatcacacactatcttgttctataataattttctgcggtatagtagcgccaatcccaaaaaggttccccattggccaatatataccggtctaaaaatttttcaaagtttaaatttaatggattatattctaaaccactttcaaatatatagagatagttgggatcaccttggttcactttatctttatcgatcattaaatggcattcttccaataagtagccaattggaataccattgatatcttcaaacaaatcttcatattttaactcctcttcaatctcttcaaggctaaatagctgaagtcctccacctatattctccccatcagaaagaatctcaaaaattttcgcaccgttatgtagtgtcatgaacttctgataatcctgtggaagggtaagctggtgtttagcctcaaagctttgaatgtcattcagggttgctttgtcctgtgaaaaagtaacaaggaactccatgatatcaccttctgaacaaaacaatttaatggctcctttttcgtctaaaagacttttcaagccatttacagtcttatgaacaaagttagtcacatacatcacccctttatttccttttaacaataacctttcaaattccaaaagatgtgaacagatcgtgataggtgctcttttcagtgaatataatgcaataaattctaaaaagaggtgcctccaaaaattgaattctctaatgaatgatgacatggtaaagatcattagaaatggccttagcgcatcgcagcatccaaagcacattcttgttataggagctggattgtccgggcttgtatcagcatctttgttgaaaaatgccggtcacagagtaacgattctcgaagcgagcggcagagcgggcggccgtgtctgcactttgagatctccctttagtgatgatttgtatttcaacgctggcccgatgcgcataccgaataaccattcgttaaccttagaatatatcaaaaaattcaaattgccaacaaatgtatttatcaacagaaccccgatggacatcatttatgcaaatggaatcaaaacacgtctccaagtttttgaacgagctcctggaatattgagatatccagttgcaccaaatgaacaagggaaaacgtctgaagagctgatgctttctttactgcagcctattctaaattttatcaatcaaaatccagcaagaaattggcggattgtcgaagaacaatacaaaaatcattcgttaagctcttttttaaacacgtatttttcatatggcgcgatcgatatgatcggtgtacttttggatatggaagcgtatatggggatgtcccttgttgaagtattgcgggaatctatctttttttcatcccccgctcacttctatgagataactggcggtatggatctgctgcctcacgcgtttcttcctcaattaaaaacaaacattctataccatcaaaaaatgatgaaaatgtctcagggtgaaaatcgtgttacgatccattgtcagcatcaacaaacggcagaattcacatcattcacagctgatctcgctattgtaaccattcctttttcaacattgcgatttgtaaaagtcgaaccataccattcattctcttactataaacggagggccatccgtgagctaaactatatcagtgcaacaaaaatcggcatagagtttaaaagccgattttgggaaaaagccggtcagcacggcggcaaatctattactgatcttccgattcgtttttcatattatccaagcagaaatattggagcaaatggacatgctgtcattctggccagctatacatgggccgatgaggcactgatatgggacagtctttcagaaggagagcgaatccagtatactttactgaatttatctgaaatctatggtgatattgtgtggtctgaatttgtgtctggcacttcttttagctggagccagtacccgtattctgcgggaggttttacagctttcgaaccaggacaagaattagagctgtatccctatattcctgtccctgagggcagagttcatttcgccggagaacacgcctcactcactcatgcgtggatgcaaggcgcgattgaatctggaatacgtgttgcttatgaggtcaatcgcttaccttagatcatgctcacatcttgttaaaactggttgatataaaaagaagtgaagaatttatactcctttgtttaaaagattaattcaaatatgggatgtctcaacattcggttctttattatctttatacacgttttgaatgcggacctcccttttcttccataatcattaataaatacccaaccataggaaacgttttaattaaccatcgggcgaactttctttcactgtataacgattcttaatgttgctttttatcctttacttgtcctctctttttttcattgacttacatttcttgaaaaccagtataaatcctaaaggaattttgtaacaaatacagaattggaaagagaagcgccaaaagaaatgctaactccttatctcaaagacaaaactgcgcttatattaaaagaaagaggtgtctttagaatggttcattttaaaaactgccctgatccttctctaaacgccaattctcagtctcaccccgaattttcatccgaattagaacatattaagacaagaatgcaaaactttattaagcactcggttacagaccaaaatatcgaagttactgacgcaagggtgacggccgaaggagaggtcacctctcttttaaaagaacgtctcgacaaggaatattataggcttttatctaaaatcacccgggaagtaaatgtggctgacttcggcgctgttccagatggaagagacaatactgaagcttttcgaaaagcaatcgggaatggccgagtcaaagtacatgttccagcgggagaatacctcgttcaagggattaaacttccatcttggacaacaattgttggacaaggtaaagggatcacagtgattaaattgcatgaagacactccagcgcatgaatgggtgattacaaatgatgattatcaaaatggaaatcgcaatatttttgtccaaggaatgtcattagactggaatccaagtagacaatgcggtgtgagaaatccagggggacagttctccagttgtttaacttttgctaaggttgaatatgggtggatcaaagatgtggaagcgattaacgcaggtcttcatggtattgatattacatcgccaacgtatgaccatttgcctgataccgattggacaaaagacggatcaagatatatttggatcgataactgtgtgacatatggttcaggagacgacggcattaccacccattatagcgaatacatctttatttcaaactgccattcaggaaatccgcggggaacagaatttgctgaaggtgtttcaaactccaacggaatagaaattgacgacggctctaggcatgtgtggcttttgaataactttacaagcggcaacatccgcggagttgaagtaaaagcccatgaactgtggccagcctctcaaaacgtccatatcataggccatatttcttatcgcgatgttcgtgcatttgatcttcgtcatattggtcaccatcaaattacagatcctgaaagcacaacagcatacgatgtcacactcattgattgttcagcagttgaaccagttttcaactcgctttacgatgctgtgaccccaagagcgctggttatttcggcatataaaaacgttaatgtaagcggattcacagcgattggtgatccagactatgattataaagaaaaccctgtcgtagccttgcaatatcgcagccaaaatataaccattaatggtattaaaattcgcggttttaaaaaagccggtgttgatattaatttatcaggcggatcaaataaaactgattatattaaaatttcaaattttgatatttataaatctgctccaaaaggaatttcaatcggtggaggcctctacaatgtcaatattctaaatggaacgatgattactgacaatgggacagttgcaattcagtcccccaataatcaggccacaattctcggtgtacaatcagaaggttatagtgtggcagcctcaatcaaaggccaaacataccaacaagttccaatcaatttgaaaggaggcatacagcttgcaacgacctctggctttgccgttaaccaaacaagcgcagttatagcaggtaccggcgacattacggcccgcggagaaagaaatgcggtcattagctcttctggaggctccagtactgaaggctctcgcgcattaatcgcttcttcaaataacgcacatattagaggaaaccaagcgtcaagaacaatactgtcttctgaaaatattatacttgaggaaccatacaccgtggcaggaggtcatcaatcaataaagtggcttcttgactctgttcggggaaacgggacgtttgccggtgcaatcagttcttctttaggtggatatggagagtattttgagagttcaactggacagttaatccatactggtacaatcgtgactttaagaggtgaaaaaattgtgcccgcgaatgttggagattatatgcttggcgttatttcagaaacttcagctttcatttcaggagcctccagtttcgtctggcagggccgttatttgacaaatgagttcggcggatttatttatgaaacggtgactgatgaggaaagcggtgaactcatacgtgttcccaaacaaaatccagactacgatacagcgctggaggcaaattatcattcacgggcagcaagagacgaatggcacgttgtagggttggttggccaacattatgtgcgtattgacgaaactgtcaatcaaggagattatcttacggcacataatggaataggaacaaaagccactgaaggaagctggaaagtaatgaaaataacctctgcttacacatcagaaaaagggtatggtatcgctctaaccgtcatcaaatagtggatacgccgaccagttcaatatatgtttatccaaataattagatctcttttctaggttctttattccttgtatgttattatcaattttcaatatctaccaaaatacccctaatatactatcgtaattaacttatattataatcaaaaaaattttgacagctgttccttctcgttattcatgaaagttgctattgaaatgagtaaatggatatcatattagacttctatagcaaatacaccatatatatcctttaagtatttacaaattgaaaatgtttcatgaggcttattaaaagtattgttcttttatcatctgtaagtcgatacaaactgcattaagatcacacctaaatctcactgagttttttcttacaaataaaatgaaaaccctttccattctaaattcatttcaccgttactaaaagtaatccttgcattccttcgccctccatgctatattcatatagcgatgagctgaattgtgtaagccgatgtacatgcctttacggcacacacgaatgtggcgtgtggtgcatcgcctcaatacgcaaagacgtttgccttaggcaaacgtctttttttgcgttatccgatttttgtgccgtttgggacaggctgatccggctgcaaaaggacgacgtcgccctggccgggtatgccgccgaggaccaagacttccgatttaaatccggcgatccggcggggcggaaagttcacgactgctatgacttgcttgttgatgagaccttccggcttgtaacgcttcgtgatttgtgcgctcgattgttttatgccgatttcagtcccaaaatctatcacaagcttgattgccggtactcttgcttcaggaaattcttccgcttttacaattgttcccgttctgatatccaatttctcaaagtcatcaataactgccatatcaataactcctttttctcctattgtaaaggagatatacaatattcttttaactaaagagccatcattttttatccgaatataaggtgtttcgatacaggcggggcggcattcctgtgcttttcgtgaaccatcttgtaaaagaagaaaggttttgaaagcccagcgcctcgctcacgacggtaagagtttcatttctctccatcagcattctttttgcttcctcaaggcgaaggtcggcaatatagttctgcggggacttccctgtctgttttttgaaccagcttgaatagtaagctgggtgataatgctcgatttctgccagcttcttaatcgtcagccgctcaaataaatggctgtgaatgtatgcaattgaggcatagctatgggattgaagcttttcttttatgtattgtactagcatatgaagcgagttggctgttccggcctttgcttcctctgtcagcaagtacctgatcgaagaccagaaaggatcgagggcagcttcaattcctgatcctgcacgatactcatcaattttcattgcatgaagcggaacatccagtacaagacattcatttcttccgatagaacggaagcgatgctcgcactgcggcggaatatataaaaaatgatccggatttaatttcacctggcgcccctcagtctcaagatcaatactcccttcaagcggaaaaagaaattggctgtacgcgtgcttatgtgaatgatatagccgtgtgtatgtccgtttttcgcaaattatctcttgaagcgagtccattagcaaaccccttcctttggtcatcttttaatccggtaatggtgttccgatataggcgaaaagccgatttttccatataaagaaactgccgccagattttctttcatcacttgtaaaaacatgcgttccgctccgttgttttttgcccattcagtcaacaccctgatcacttgggttcctgccccttttcctctgtgctcctcagctacaacgatattactaagtccgccataaccatcaatgacagaaaccgtgccaagcgctgtcaggctttctttgtcatacatcttgaaaaaagttttacacggcggcatgcgttcgaatatgtgtttgtaacctttgtgacgctcgggtgaaaacccttctaattgaataaattcatctatccaaacagatgatggctcttgttcccacttgtatgtaaatcggctgttgtcatttgttcggctcataattgaccggcacaacgctgtcatctggaagcactcgtctaccttttcataacggctgtctgccaatgcgtcatcaagccctttcggtgatgcgttgctaatatgaaaacaaacaggtaagcctaaactttgataaaaaagttcggcctctagctgaaaatccccttcaggcatatccgcagacgtccatacgctatttgcccttttggttacgccaaaattcgctctgagaagccatttccctatgcttttttgaaaataagccggccatgaagctgccgctaatcgttcaatcttgcgaatgtcatccattgcataatgcctctcccctatgtatactcccttgatattatacaatattcagaaatataagacatccatttatttgtttacataatatttttattgtttattaataatcctgacaaaaatgtccgaattgaaaatgacaggctttctaaaatgtcctcctcacgttcaaatgcttcttttgcgattaaaacagtaaagccatgcagcagacttctgagcccccttgtcgcatgaatggcagtcttttcacttgcatagccgttttcaatgagcagcttcgtcacaagacagacaatttggtcagagacgatttccgtccgtttgtcgtgaaccttaagaagagccgcttcataatatccgggattttcaattgcaaaatcaacatatgcatgagctaaagaaagcatcgcggaatctccctttcgttcggttacggagtccgccatttgatcaaaaagctttgtcagtcctctgacagcaagttctgctctgatcgcttgcagcccgttgatatggttatacaatgacggggggcgaacattcatttttttagaaagtgcagcaagtgagacaccatttaccccttcctgatcggcaatctctgctgcagcgtctacaatcattttttgggtcaaacctattctcggtgacatgctcatcatcctttctttgctttttggatcgcctgtctcatccgctctgaaggtgatcgcaggaattttccatgtccgacagcgagacaggaaggcgccttatcggcgagcaattgtgcacttttgatggcctcctccttattccatgtggcgaaagcgggaaaaggaaacgcccattttatctgacctgatacagcgattcctccgcgcaactgaaacgcatctcctgctattaaagtgccgtttcttgtatcaagaaatgacatgctgcccggtgtatggcccggtgttggaatggcaagcagagaaccaattgtttcaccgcccgtcagcagttggtgaggctttgtttgtatgtgtttcggaatacctccttttataggcgtctgcggctcatcttgccgcaaagatgtgtcaccttggagcaagaatgaatcccgttccgagatcatgacctttgcatgcggaaatgtttgtgccaatgtatccagtgatccgacatggtccccatgtgcatgagtcagtaaaatatgctgaagcggttttccaagctgattcacagcttgaataatccctttatagctgcctggcagtgcggcatcaataagggtgacttcgttttcttcctctactaaatagcaattaaccggaaacaatgctggaaaaaaagtcagctgccaaaccgtttggtactgagtaattctcatctttttattcctcctaacaaaaactaatggtgttagttttattattaactaacaccattagtttttcaagagtttattatttttttatcgctacataaatgttaacttgtgctcgctgtggcactgcggcattttgatcatacatctcaaagtcacctgtaaacgtgcgcagatgccgcttatcccaagtccaaatttccttccacgtttcaagcacaatctcttcaataggaccgattctggaagtgaaaacggcgtaagcggaagccggcaaatcaatattttcatatggtcccggaagaatgtcgtcgtattcctgaaacgttccgactgaaaacgtataaaacccattcgtctcttgttcataattcgaatataaggcaataatgctcttgtctttttcagcctgtgataaaagagcgctcatatcctgcttccataattgatcccacagtgccggaatcctcctttcttccgtcatttccagtgcgttgcttgtccgttgtgatagtccggcaaatcgtttcaggtctaagtgtgttatatgtgaaaagcccatacgatctcctcctttttttaagattatagacaaagaaacctgacagcagtgtgtcaggtttcatatattttttgcatgtgatgaatggtttcttttactttatcccttatatgaagaggctgcagaacctcaatatcctttccgaactggagcaaaaaaccgatcagccattgatcttctggaagtgaaatcaccgcctggcagatttcatcttcctcacaacagtgaaggacatcatatccgaaccattcacctatacgctgacgtgctgacggctgaacaagaataaccaattcagttaaacggtccttttggtaccaactcttatcccatggcaaagtgtccagctgaatgtcttttctgataaatgtctgatgtaagatggccagatctttcatccggttcagtttaaaaaagcgaaaatcatttcttaccaggcagtaggcatataaataccagtgccccgccttgcaaaccaatgtataaggttcagtttcccgaagtagtgtttccccgcttgcgcttgtatatgtaaaagatatcgttaacaaccgatcgatggcagcgctgattttctcgcgcagcgtcttttgatcctcagtatggccccaagccgtcatgtcaataaaccatttttctgtttggtgcttaaatgcttgagtagattgctcaggtataaggtgtttgattttttgataggctgtgctgtgagaaacgggttcatacatagatgaaacgctttgcaaagcggaagcaattgcaaacaattcctcctccttcagccactctctttcaagccgatacgtttccatgatgccaattccgcccccggaaccctgtgaggtcacaatcggaataccagccctattgatcgtctcaatatcacggtaaattgttctgacagatacttcaaacagctcagcaagctctgcagcctgcacttgttttttgctgatcaataacacaaccatcgctaacaaacgttccagtttcattctgcgcaccttttcttcttgtattttccaacaaaacaatcataacattttgataaagcttgggcatatctattatgcggcggaatacacctcgcatatgctatgaaaacaggggtttccccttcttttttgtgttcagtatttatttcagctactatttccgaccggataagcatacacttctcaacggaggggatttcacatcatgcatcttacacttcagagcgtttatcctgccataatcatcatcttttttctgtataaaaaaattaaaaggtccatcggataccagccgctgaagccccgctggctgttcacccgtatcattcttttctcgctgtttgcttttggactttcaatcttcagcgccattcacccttttttatatggatatctcattttgggcattcttggcggatggctccttgtctttttcgctaagaaaaacatctcttttgaaaaacgcagaggaaagatctattttcggactcatatttgggtagaggtgattctcttaactttatttctatcaagatttctgtatcgagtgacggagctttatcttacctcacctgatctaaaccgccttggatcatacagtcagtcaatcggaacggaccctctgacaattggcgtctgttttctgatagccgtttattatatcggtttttcttcttttatcatcaagctcagcagaaacgaacttgaacagcacgaatacaataaagaaaaagacatccttgcccgctaacagcgagttaagcaaggatgtctttttcaatcatgctgtgtatgatggatcatttgctgaagaacatctaaaacatgttcatcctccggagagtaataaatcgatgttccttctctgcgcgatttgacaagccggagattttttaaaaatctaagctggtgggacacagtggattgcagtaaattcagcttttctgcaattccgtttactgcatgctcaccttgggacaataaatggagaattctgattcgggtaggatctgaaagcgctttgaatgtttgcgcgactagaaacagcgtctcctcgtccagatcagcagccgattgttccgtttctctaaattcagtcatatgtatcacctttctttattcatagttttatcttataacaaatgcgcttgagtgcaaaccagcctgcttgtattccatttcaatctcatagtttaaatttatgtttcaaatcaggtttttacttggtctgatataccctcttatgtcataataaaaaaggtcatactgctccaaacattgagggtgaaacacagtgaagaaaaagagaaaaggctgtttcgctgctgcgggttttatgatgatttttgtctttgtcatcgcctcttttttattggtcctgctttttttcaaccgggatttaatcaaaaaacttccgatcgatacgaaaacgattgttttggaacgtttaaccgattacaaacccttggtggaagaagagcttgaaagccaaggactctctaattatacatcactcatattaggcatgatgtatcaggagtcaaaaggaaaaggcaatgatcccatgcagtcctctgaatctctggggttaaaacgcaatgagataacagaccctcaactcagtgttaaacaaggcatcaagcaatttaccctcatgtacaagaccggtaaggaaaaaggcgtggatttggataccattattcaaagctacaacatgggggcaggttacattgattttgtagctgaacatggaggaacgcatactgaggaattggcaaaacaatactccgagcagcaagtcaaaaaaaatcctgatctgtatacttgcgggggaaatgcgaaaaatttccgctatccgtattgctacggtgattatacgtatgcagaaaaagtaaaagaaaaaacaaaaactgttgaagaatctttgcaggttgcaacacttgaaaccatggaatccaaggctcatgaataagagtctatcaatttactgacaaaagcccaaaaatgaatttgggcttttgccatgtttacacgtaaaaaaagccatactgagtatggcttttaataatacggtgaaatcatcaaatatacaataacgcctgtaaggcttacatacagccatagaggcattgtccatctcgcaatttttttatggcgctccacctgcatgctgaagcctctgatcagcgtaaacagcgcaagcggcacaataattgcagaaaggcagatatgtgtaattaaaataaagaaataaatcgggcgcataataccttctccgccatagagcgtgttttccgcaatcgagtggtacgtcacatagcaaatcaaaaatagtaatgttgttgtgaacgcagccaaaataaagcgtttgtgagctttgatatttttctgtttaatcataatcagcgcggccaataagaagataaacgtaaagctattgaatatcgcattcagcattggcaaaatgtgaatattcgcatggctgaactgatctaatttaggcataaaaaacagcactgcgattaaaccgttaatcagaactgtcagcgtaaggacaatccccgtgtaatttttcggtttattttctgtttggttcatttggtgacctctcctaatttgtactggctatccaaatcgtatgcaaattcaaagaagatgtcaacggtttcgattgcttcgtcagaaattagacacacttcaaaggccggaggctattagccccggcctgttaggtttacgcctcttttatcaaatgttcaatgaccttatgttcattttcattcagcaggttcttttgaattttcgaatgaatgggtttattcatatgctgatccaagatatcggccgtttctttatccccggcaataaccattcgttcccatcttttcgcggcagctttttgatcaaggctggcagccagccgcttatacagtctcgattggttctctgttacatgttccctcatccggttctcttcaaatggtggcgctttgtctacagcggaatggctattcttccaagactcattgatcatatcatactcataacgctccaccgcctcaatttttcctaaaacagtttcaataattttcacttcatgctgctgagttaaaataaacgccgtacttgggtatgtctggcgcaaaccctttagctgatccaggacagctgtttcttcccagtaaaatcttgtatctacagggacttgaagcttaataggttcccatatgccgctgtcggaaacaaaaaacacgagactgcggggcatgtcttttcccattgcattcaagtattgattcattttagccctgattccatccagacacttttcctcctctggatcactagctgccaaatactcttttaatcggctgaatcctgactttagggcaatcttccattctcccccctgctgctctggatctctcatgtctgtattgagatacagagagagaattttatccggcggttccaattggacatactgtaatttgttaatcaatgaatcaatcgccattccgattcctcctttttcacaggttagttttctttttcctctcttaaaaacgatcaaacctgactttccgctaatttctagtaataatggaattgttgtttacaatacgcctctcttctaatacaattggtaactgtgtttctaagctgttttttgaaaggagtttgatcttgtttactgttaaagaaaaaaatcgtcaagagcttgaggaagaactaaatgatttagaatttcaaatttatcgcatgcaggagaatatgaaggatttatctaaagatgccaaagtgcttggtattgatcaatcgaaacatgatgagtggatgattgtttcctcgattgatgatggccaaacatgcaaaattatgctaactgattgtaaaacggcataccgaggaaaaggctgtttttcacttgtagcgtcttacaaggacgatgccattcatataggggatataaaaggccctccgaatcacgggtttggctccatttgcatgaaatatttaaaagatattgcaagagaccataatataccgaaagtcaccggagacatcgccaaacgggattggaatcatgtagaccggctgattcacttttatgaaaaacatcacttcaaagtatgtatcgatcatgatacccaatccggcagcattaagtgggttgatttgtaaaaaagtctggaagaaagagccaagatatgctgtaatggtataaaaccattgatggagggttctatgtacgcctcaaaactgaaaaagggagacgaaatccggatcgtgtctcccgcgaccagcatgtctatattatcaaatgaagcaaaaatccaagcaaaaacggcgttagaacgcttaggttatcgggtaaccatcgctgaacacgcaaatgaatgtaacgaatttgattcatcctctatcgagtcaagagtccatgatctgcacgctgccttttttgatccaggcgtcaaagcgattttaacgacactcggagggtttaattcaaatcagctgctgcgttatcttgattacgagaaaatcaaacgacatccaaaaattctgtgcggttattccgatataaccgctctttgcaacgctatttatcaaaaaacgggtcttgttacgtattcaggtccccacttctcaacatttgcaatgaaaaaaggactcgattatacagaggagtattttctttcttgctgcgcttcagacgatccgtttgaaattcacccctcaagtgagtggagcgatgatcgctggtttttggatcaagaaaacaggcgtttttatcctaataacggccctgttgtaatccaagaaggttatgcggaaggtactttaattggcggaaacttatgcacgcttaatttgctgcagggaacggagtattttcccgaaacagaacatactattttattgattgaagatgattatatgtcagacatccatatgtttgaccgcgatctgcaatcactcatccacctccccgctttttcacatgtaaaggcgattttgatcggcagatttcagaaagcatcaaacgtatcaatagatcttgtaaaagccatgatcgaaacaaaaaaagaattatccggcatcccgatcatcgcaaatataaatgccggacatacctcgccaattgccacgttccctataggaggaacatgcaggattgaagctatttcgggtacatcacgaatatggattgataaacattaatcagcttgtaaatttttttacaagcttttttagcgcaatcggctatgcatgccgcacgagacatgacaaatgtcatataggaggcatgatgtgtgctactacaaaagacttctctcattagcgtatactgaaccgagacacacaatgagaggatacttactatgactgaacaaaccattgcacataaacaaaaacagctgacaaagcaagtcgctgcatttgctcagcctgaaacaaaaaacagcctgattcagcttttaaacacgtttatcccattcttcggcctatggtttcttgcttatctcagcctcgatgtctcctatcttcttacgttagcattaacggtgattgccgcaggttttctgacaagaatttttatcatcttccatgactgctgccatcaatcttttttcaaacaaaaacgctataaccacattctcggttttctgacaggtgtcctgactttattcccgtatcttcaatggcagcacagccattcgattcatcatgcaactagcagcaatctggataaacgcggaacaggagacatctggatgttaacagtaaacgaatataaagctgcatccagacgaacaaagcttgcatacagactttatagaaacccgtttatcatgtttattctcggaccgatttatgtttttctgatcacgaaccgttttaacaaaaaaggcgcaagacgcaaggaacgtgtaaacacataccttacgaatctggcaattgtcgcgttggctgccgcttgctgtctgatctttggctggcaatcgtttttactggtgcaaggcccgatatttctgatttcaggttcaatcggtgtttggctgttttatgtgcagcatacctttgaagattcttattttgaagcggatgaaaactggagctacgttcaggctgctgttgaaggcagctcattttataaactcccgaaactgcttcaatggctaacaggcaatattggttaccaccacgttcatcatttgagtccaaaggtgcctaactataagcttgaagttgctcatgaacatcacgaaccattaaaaaacgtaccgacaatcaccttaaaaacaagcctgcaatcacttgcgttccgtctatgggatgaagataacaaacagtttgtgtcatttcgggctataaaacatatacctgtaagccttccgcctgattcaccagaaaaacagaagctgcggaagaatgcctgatgataaaggaggtcttctaatatactagaaggcttcctttttattgttggagggtgcattctggctttcacaatgataaagttacaagtaagatgaaaagctgaaaatgaggtaagatcatgattaaaaatcattttacatttcaaaaactaaacgggattacgccctatatatggacgatatttttcatcctccccttctactttatatggaaatcatcatctacatttgttattattgtcggcatcattttgacgcttttatttttttcggtatatcgatttgcttttgtctcaaaaggctggaccatttatttgtggggatttttattaattggcatttcaaccgcctccattactctgttcagttatatttattttgctttctttattgcttattttattggaaacattaaggaacgcgtcccttttcatattttatattatgtccatttaataagcgcggccgtcgcagccaatttcagtctcgtattaaaaaaggaattctttctgacacaaattccttttgtcgttattaccctcatcagcgcaattttattgcccttcagtataaaaagccgcaaggagcgcgaacgacttgaagaaaagctcgaggatgcaaatgaacggattgcagaactggtaaaattagaagaacgtcagcgaattgcccgcgatctccatgatacgcttgggcaaaagctttctcttattggtttaaaaagcgacttagcaagaaaattgatatacaaagatcccgaacaagcagctcgtgaactgaaaagtgttcagcaaacagcgcgaacttctttaaatgaagtaagaaaaatcgtttcctctatgaagggcatccggctcaaggatgaattgatcaacatcaaacaaattctcgaagcagctgacattatgtttatctatgaagaagagaaatggcccgagaatatctcattgctgaatgaaaacattttgagcatgtgcttaaaggaagctgtcacaaatgtcgtcaaacacagccaggctaaaacttgccgagttgacattcagcagctctggaaggaagttgtgattacagtgtctgacgatggaacattcaaaggagaagaaaattccttttcaaaaggacatggcttactcgggatgagagaacggcttgagtttgcaaacggaagccttcacatcgataccgaaaacgggaccaagcttaccatggcaattcctaataattcaaaataaacataaaggatggcttatatgattagtatatttattgcagaagatcagcaaatgctgctgggcgctttaggatcacttctaaacctcgaagacgatatggaagtcgtaggcaaaggtacaaccggccaagatgctgttgattttgtcaaaaaacgccagcctgatgtatgtattatggacattgaaatgcccggaaaaacagggcttgaagctgctgaggagctaaaagatacaggctgcaaaattatcatcttaaccaccttcgccagacccggttactttcagagagctattaaagctggcgttaaaggctatttgttaaaagacagtccgagtgaagagctggccaacgccatccgtagcgtcatgaacggaaaacgcatctatgcacctgaactgatggaggacttatacagcgaagctaaccctcttacagatagagaaaaagaagtgctcgaacttgtggctgacggtaaaaacacaaaagaaatcgctcaggaactcagcatcaaaagcgggacggtgcggaattatatctcaatgattctagaaaagcttgaagtgaaaaatcgaattgaagccattacccggtcaaaagaaaaaggctggtttaaataaaaaaggatcttggcatctgccaggatcctttttgttaacctgaaattcccgtttgagaacctcgtcgcaaccagaattaaattgatccatatcctcgctcctacgcccgctgaacgattgtttggttaacagcccaataaaagactggattgaatgatatccctgttaaaatggtcggccattgcacatcagcagaatttctgatattgattatattgtattttcagtatgacaaagttgtgccacttcgctcccgaagctgccatgcccaactgcaagagcctaatatcacaataaaaaaccgtctgaaatcaatccgattccgtaaatggtatctgctacatccaactgcttattatctgccaaaaacaccagctcgtttcgctgatcaaagatagtaacaaccagctataaatgtcatgatgccgaatgtctctgtaatgtggaatcaatcttttaacccgagagcccctgaatcgcacataaagaaaaacgggaccactttcttttatcagcatatgatataaacagctctaagcagaacaaaaaaagacacaagccaaaagcttatgtcttttatcacaatctatattattagtttaagactttaacacttacagttttgacgccccaattagaagcatcacttttacttggtacaaatacgtcgattttatttcctttaatagcgccgccagtgtctgctgctgttgcttccccgtagccttcaacatagactttagaacctagcggaattacattaggatcaaccgcaataactttcgcgttcgggttcttatttaagtcaatgcctgtagctgtaacgccggaaatgccgccgtcgttagcagtgtaagcagtagcagtaactgttagttcttttgaagcttcttgattatttgtatttgattgaacagccttctcctctgtgttaacagaagtttctgcctcagcctttgtttcttgtttaggttgctgttgtacagcttcttgtttaggttgctctttttgcacagcctcttgttttggcgcagcttgaggtgcgtttgtttgcgcattctcagtagctgtgtttgctgctgttgcctgaccttttactgaaagagttgatccagcatagatcatgtcagagcttaagttattccaaactttcaggttgttgactgtcgtgccgaatttttgagcaatcttagaaagcgtatctcccgctttaattgtatattgcccagtcgtggttgtttcttctgaagaaatggtcagtttttctcctgcaatgattttatcagaagttaacttgttccattcttttaagtcctttaggttcactccatttttctgagagattccccagagcgtatcacccttttgcaccgtaatttcttttgcagaagcgtgagctccgaatgcagttgttgaaagtgcagcaactgccacaaaggacataatcgtcttcttcataagtaaatcctcccttgttagctttttattggcggctaacaggtgatatcgtaacacacgtaaatgtcaaatcaataacaaaaagatatgatttagattacagttcctttacatgaaggatttctctctgatggaaagacttgctgaacccttgatataataggcttcgcaggtctttttattttgaggcgaaacagagaaaataaaatgtgttttttatagaaaaaaagattgtttttctgtttttttagtctgtcatccttgcataagcctgtatttcttgtaaaaaaagccggccgtattttgctcttttttgttctccgactccttttatagacaaaagttcatcatcatttacgggctgttttcctgacatttcttttaacgtttggtcagagaaaacaacaaatggcggaacaccctgctcagccgcaatttctttccgaaccatgcgcaatcgttcaaatagctcgtcattttcagtaatcgctgccgcttttaacgcttcttttctcgctactgataattctcctttcagcacattccttcctttactgctgacaaaaagagtcggaaacgttccgtctgacatcctgatgaagtcgtcagaaataagaaattcgataaaatcactgatttcgccaacggattggtgttttaatatcccgtatgttgaaaggtcggaaaagccgttttcaagaacttttttatttttggagccggcaagcacctgggcaaccatcgtcttgccaaaccgttctttcatgcgaatgatacaagataagaccatttgcgcctcccgcgtcacgtcatgggccgctcttgtatcggtacagtttccgcactgtccgcacgcatcaggctccttttctccgaaatacataaggataaaacgctgcagacaatcttccgtatgacagtagtcgaccatttgtctcagcttttttaaatcctgcttttgtttctcttcatgttctgattgctcaattaagaagcgctgcaccataatatcctgcggtgaaaacaggagaacacattcactggcaagaccgtcccgtccagctcgtcctgcctcttgataatagctttccatatctttcgggatttgtgcatgcagaacaaatctgatatttgatttatcaatacccattccaaaagcagaggttgccaccatcacttgaagctcatcattaagaaatctttcctgctgctcttttctcacatcatcagccaaacctccatgataccggcctgccctgacctgatttcgtttcaatctctcatatatccgatcagcttcttttctggtcgctgtatagacaattcctgcttcatgcctgttgttttgcacatattcgtctataaaccgatctttattttctccttttactactttaaaggttaaattctctcgggaaaatccggtatataccgtgttttctttttgaatatgcagctgtttgcaaatatcatcatgaacctcgggtgtggctgttgctgttaacgccatgatgacaggcttgtcgtgtaattcacggaacaagatttcaatattcctgtagcttggcctgaaatcatggccccattgagaaatacaatgcgcctcgtctattgcgaccaaaggaacatctatgccctgcaaaatccggataaactctatggacgttagtcgctctggtgtaatgtaaaaaagcttataagccccttctttgagtccgttcagcctctcatatatttcctgattggattgtgtgctgttaatgtaggcggcgttaatccccgcttcttctaacgcatcaacttgatccttcatcaaggaaatcaacggtgaaatgacgatcgtcgtcccttcaaacattaatgccggaatctgatagcaaatcgatttgccgcctcccgtcggcataatgcaggccgtattttgcctcgcttccgtcaccaagcggatcgcttcatcttggccgctccgaaacttctcataaccaaaataatgagccagaagggattgggctctatgtaacataacgtgtaaacctcgcttttccttgaatttctcccatcatatcataaaaaagcggccttcatttctttcacacaaaaatggaatattcactataccaaacctttttagataaaataaaaagccatttccgaaaaggaaatggctttcgctacgtcttgccgtatgcaagtaagaaagttttaaaccaccactcctcaaagtgggtgtttgcagaaacgttcctgtcgtcctctgcaatggaggcatgacattccggcttcgatataaaactccctattacagcttaaaggttaaaacttaattaacaatacgcacaaagtagcttctttaatatagtacaccatcaggcgcttttaatcaagaggtcagaacaattgtttagaaaaactttttccagtgaataaaactgttttttctccaaaatacctgacaattcgacaaacaaaaaatatattacaataaaaaaaatagcctttattgctaaaagcgaatgattattttcttctatattaatgtgtatatacaaaaagactcctatttgtaacgataggagtcttggctttattagaattttgcagcaagatcttttgcttcttgtaaacctttttcaacgatttcttgcgcttgatcaggtgctgcgttatgtccttcgatgacaactgtgtgcaagtcttgaacaccccagaaaccaagaactgttttcatgaagtttaatgacatttcaagtgcagccattggtccttctgagtagacaccgccgcgagcgttaagaagcgcaacttttttgccgcccattaaaccgactggtccttcttgtgtgtatttgaatgtaacgcctgcgcgagacagataatcaacataagtatgaagcactgctggcactgtgaagttccaaagcgggaatgcgaaaacaactttgtcagcttttacaaactggttcagatatttgtcagcaattgctgcttgttttttctcatcttctgtcatttccattccttgacctgctttaaatgttccgttaatcatatctctgccaaggtaaggaaggttttccttatgaagatctaattcaaccacttcatcattagggttgttttctttataagcagctaagaaagcttcgtaaagtttagttgaaacgccttcttcagctgtacggtcgcttgattttacaaataaaactgtagacatttgtattcctcccggtaaactttttatatttacttacaaatagtatgttactttcttttttacgtaaagtcaatcactttattttgaatatgagattttttttcaaaaaaaagcaagtacatctaatatcggtgtacttgcttggcatttttacttcgaatcttgttcacgatccaagatttcatacgtctgcgagcttttttgatcaattgtttctttgttggataagtcttttacctgttcatgaaactctctttcataagaaggagcatctgtctccagatcatcctccacatcagcttgggcctcaactgtcattcttgcataaggaacagcttcaagtctttcgtaaggaatctcttggccggttttttcacacacgccataagttccgtctttcatcttttgtaatgcacggttgacctcctctaacagctcccggtcaatctctttcactgtttggtctgtcatccggtctgtgacgagcgtcccgtggtctgccatatggttgtcaaccccattggaaagctcccccacttcttccgtcattgattctgtttcctttttctcgccagacaattctttttgcatatcgagcaatttatgatagagatgctgtgtttgttcttttgtcagtgccatgtatatcctctcctttctatcctgtttcccgttttgccttctgtcaaacatggaaacatcgatggaaagatgagctactgcctttttgaacggatcgtgaccgctggcgtcgatggtgcttcgggttttcgttggcactttttgtccttctcttctggcggtatataataggttgcgcctatatttaatctgccgctcagttcatcaatggtcagctcgccgaattcaagatgatagtcaactttttcgacattcagcgtttcaatatgtatataggtttcttcagactcttgtttgctgctttgtttttgtttctcaatcactgagagtctttcttcacattcacgcagtttgtcaagttctggtttcaagcaatgcctgatcagcgaccggaacatttttttcatgacatcacgaccctttgcatactcctctttcgtctacatatataatgaggtatatcccatagaaaggagaggttttcatgcttccgactaacatcaatatttctcatctcaagactaactcgataggcaccggctcatcccttacctttggttctgcggagttaaggaacaggtgctctgctatcaaaagaaataacggttttggggaacaaaatgcagatggtattgttatggtcattccgattgaatcaattgatgaccgtgatgtgtcagatgcactcagtatgaaaatcaatcatcaataacaatggttttcgcttgaccttcgtctttttgaatagtgatgtataggattccgtctttaaaaatggcattcatctttccatgaagatgatcggaaagcggaattttcttttcaaaacttccgtatttcccttctttttggcgaaagtcctgttcattaaaataggaaaagcgctgccccttcaccactaaataatctccgtacgataatatgtgaacgtcttgtttacggtagcctggaagataaattaaaaactgcacttccgcaacggtatctacaatatccatgctcggaaatgaagcatctcctttccctcgctgatcttgctgcgcaaacggaaacggagattggccatttgtcataaaaggggttttttggtcttcatcaaatacctgtttccaaaagtcaccgccgtacatctgctgtgcgaattccatccactgcttcatcttttcgaaatccatttgaagccccctgtcttaacatactttataaccgccagcatacaactatagaaaggaggtttgcctgtggttcaaccaactccgtatatcaatattaatattttcatgctgaaaattaattcctttgaaaatgcttcagcggttaacgtaggacaaaatttattggcagaatggcaaaattcagataaaaaaaatcaaggctacggacagaattttggagatgcgagcggatttatgggcacgagaagccatgtggatgacagagaccaaattgattctccggcctcttttgaaagtgaagcggttaactcctcaatcaaaaggaagtgatgagatgttcttttcaccctccgtcgtaaatgtcggcggatttaaaatcaatacgatggatcgaggttcctctttaacactcggtccgtatcagcaggtcgattactttttatcagctaaaataaatcaagggtttggagaagaaaatggcgactttactcctcttgtcgtgccgatttcaaatgtattagatgcagatcttgttgattcgaactcagcgaaaaacagtgtggtgtaataagaacagggcgcacatgccctgttcttgtttttatatataaaaaaagcctaaccattttttgaacggctggctcatcaaatattcagctgcacaaatgctttgtcagcaccgcctgaacctcgcttaaatcggtgtctttcgcaaattctaattcgaaagttttgcttcttgtcatcaataaaagcccagtgtccggatcaaacattcccgcttcttggatggcaaagctttcaattgttttatatggaagaaatacacgaaccttctttttagaaaacattttattgtcaaagaaaatgatccgcttatttgtaaagcaaatttggtccactcggagcttataaatcgattcaattctttccccttcaacgagcaaagcctcaagcttctttgcgtccgttgatctgctaacagaaaaaatacccaatgaagaacccctctttctgcatttatctatttgttttatcattcactacataaaaataagtcctttatccctatataagaatacgacatagaagacatttaaaccattacgaacagattacatttttcaaatttttgatttgttttttggcttttaagctgttgtcatcaagtaatacgcacatatagagaaaaaagtttcaatattcagcaatgtttttataaaaaagtggtttttaatgatttttttaattttgttttatatttcctgttttaaccacaaaaaaaccgcagctgagctgcggttttatgtatcgactgcttttaacaaaatctgtttgatgcttcaaggaagcattacatctcttcgaagtattctttataatagccgccgactttattcgtattgtcgaccacaaagagaaactcctctgtttcattttttacttcatattcttttcccggcgttaaaacgcggtttacgatatatttttttgcgtttgtctgcacacactttacttttttaatggtttctttttcaagccaatttttatgaatcatgatgaaatctccttttcttatctataagcttattgtagcttttttcttttgtaaattgcaatatcggttattcattgattttgccttgatttctattatagaatgtttgtatacgcttacgtttgaagcaactatcacagcttatttctgctattcaatccaggaatcaatgtgctatcaccaagaatctcagaacagaccataaaaaatgactggaggtttgttacggatgagttctttaacgatgcaagtgacgaaaaggctggagacatttttacagggaacaaagaagctttatattgacggaaagtttgttccgagtgcctcaggggcaacctttgacactccaaacccggcgaccggcgaaaccttgatgacgctgtatgaagcccaggctgcggatgtggacaaagctgttaaagctgcccggaaagcctttgaccaaggtgaatggagaacaatgtctccagcttcgagaagcagactgatgtataagctggcagacttaatggaagagcataaaactgagcttgctcagcttgaaacacttgataatgggaaaccgatcaatgaaacgactaatggagatattccgctggctattgagcatatgcgctattacgccggctggtgtacaaaaataacaggacagacgattccggtttccggcgcttattttaattatacgcgtcatgagcctgtcggtgtcgtcggccagatcattccatggaatttcccgctcctgatggcgatgtggaaaatgggcgcggcacttgcaacaggctgtacaatcgtcctcaaaccggctgaacaaacaccgctttcagctctttatttggcagaattaattgaccaagccggtttccctgccggtgtaatcaacatcatcccaggattcggtgaagatgcgggagaagcgctgacgaaccacgaagcggttgataaaattgcctttaccggttccactgaaatcggaaagaaaatcatgtccaccgcagcgaaaagcattaagcgtgtgacattggagctgggcggaaaatcgcctaatattcttctgccggatgcgaatttaaaaaaagccatcccgggcgctttaaacggtgtgatgtttaaccagggccaagtctgctgtgcgggctcacgtgtcttcattcataaagaccaatatgatgaagttgttgatgaaatggcatcctatgctgagtcactccgccaaggagcgggacttcataaagatactcaaatcgggcctctcgtaagcaaggaacagcatgagcgcgttctttcctatattcaaaaaggaaaagatgaaggagcaaaagcagtgaccggcggaagctgtccttttgaagcaggatattttgtcgcactgactgtgtttgcgaatgttgaagacgaaatgaccatcgcaaaagaagaaattttcggacccgtgctgactgcaattccgtacgaaacagtcgatgaagttattgaacgggcaaaccattcagaatatgggcttgcagccggactatggacagagaacgtcaagcaggctcactatatcgcggaccgacttcaagccggaaccgtttgggtcaactgctataatgtgtttgacgcggcgtctccatttggcggttataaacagtcaggactcggacgagaaatgggatcatatgccttggataattacacagaagtcaaaagtgtatgggtaaaccttgaagactaacatgtatgtttaaaaaactgctgcctgccagcagtttttttctttctgtaatggcagtaaaagacgctgaatatatatgcttctgaaggagttgagcgtgatgggcacacttcaggagaaagtgaggcgttttcaaaagaaaaccattaccgagttaagagacaggcaaaatgctgatggttcatggacattttgctttgaaggaccaatcatgacaaattccttttttattttgctccttacctcactagatgaaggcgaaaatgaaaaagaactgatatcatcccttgcagccggcattcatgcaaaacagcagccagacggcacatttatcaactatcccgatgaaacgcgcggaaatctaacggctaccgtccaaggatatgtcgggatgctggcttcaggatgttttcacagaactgagccgcacatgaagaaagctgaacaatttatcatctcacatggcggtttgagacatgttcattttatgacaaaatggatgcttgccgcgaacgggctttatccttggcctgctttgtatttaccattatcactcatggcgctccccccaacattgccgattcatttctatcagttcagctcatatgcccgtattcattttgctcctatggctgtaacactcaatcagcgatttgtccttattaaccgcaatatttcatctcttcaccatctcgatccgcacatgacaaaaaatcctttcacttggcttcggtctgatgctttcgaagaaagagatctcacgtctattttgttacattggaaacgcgtttttcatgcaccatttgcttttcagcagctgggcctacagacagctaaaacgtatatgctggaccggattgaaaaagatggaacattatacagctatgcgagcgcaaccatatatatggtttacagccttctgtcacttggtgtgtcacgctattctcctattatcaggagggcgattaccggcattaaatcactggtgactaaatgcaacgggattccttatctggaaaactctacttcaactgtttgggatacagctttaataagctatgcccttcaaaaaaatggtgtgaccgaaacggatggctctgttacaaaagcagccgactttttgctagaacgccagcataccaaaatagcagattggtctgtcaaaaatccaaattcagttcctggcggctgggggttttcaaacattaatacaaataaccctgactgtgacgacactacagccgttttaaaggcgattccccgcaatcattctcctgcagcatgggagcggggggtatcttggcttttatcgatgcaaaacaatgacggcggattttctgctttcgaaaaaaatgtgaaccatccactgatccgccttctgccgcttgaatccgccgaggacgctgcagttgacccttcaaccgccgacctcaccggacgtgtactgcactttttaggcgagaaagttggcttcacagaaaaacatcaacatattcaacgcgcagtgaagtggcttttcgaacatcaggaacaaaatgggtcttggtacggcagatggggtgtttgctacatttacggcacttgggctgctcttactggtatgcatgcatgcggggttgaccgaaagcatcccggtatacaaaaggctctgcgttggctcaaatccatacaaaatgatgacggaagctggggagaatcctgcaaaagcgccgaaatcaaaacatatgtaccgcttcatagaggaaccattgtacaaacggcctgggctttagacgctttgctcacatatgaaaattccgaacatccgtctgttgtgaaaggcatgcaataccttaccgacagcagttcgcatagcgccgatagcctcgcgtatccagcagggatcggattgccgaagcaattttatattcgctatcacagttatccatatgtattctctttgctggctgtcgggaagtatttagattctattgaaaaggagacagcaaatgaaacgtgaatcttatcaagcggagatgttcaattggtgtgaagccctgaaagatcagattcaaaagcgaggtcagcttgaccagtttgaagatcaaatcgacaagatgattgaggctctggaagatgaccaaacaacagaagaagattggtataaacaggccgctgccctttatcgggatattacagaatcagatgatacaagtgaaagacgcgcttatgtccctatagggaaacacgtgctgccaaagcttccttacaaatactccgccttagaaccttatatatcacgcgatattatgatccttcatcatacaaaacatcatcaaagctatgtcgatggcctgaacaaagcagaatcagagcttaaaaaagcgagagcgacaaagaattatgacttaatcactcattgggaaagagagcttgcgttccatggagcaggccattatttgcatagtattttttggttttctatgcatccaaacggaaaacggcgtcctacaggggcattgttccaaatgatagacctttcatttggaagctattccgcttttaaagaacattttacccaggcctctaaaaaagtggaaggcgtcggctgggccattctggtctgggcacctcgatcaggacggctggagattttaacggcagaaaaacaccagctctttagccaatgggatgtgatcccccttttaccgcttgacgtatgggagcatgcctactatttgcaatacaaaaatgaccgggccagctatgtcgatcactggtggaatgtcgtggattggcgcgaggctgaaaaacgttttgagcaggcaaaagaagtcgtttggaagctctattaaaaaaagccccctttcctcgggggcttcgtgtgttaaaaaatacctatcacatgcaaaaacacgatgatgatggcaacaggagatagatatcgaatgagcagcagccaaaccgcaaaccactttcgtttgagattggaaccgcttttcagctcgtcaaacaaatcctgtttcggtatttttagcggaacaaaaatcgaaatcagtaacgcacctaacggcattaaaatattgctcacaagatagtcagccgcatcaaaaatagacagatgaaatatagtgacgtcacttaagacaccgtatgataatgcagacggcacaccgacaataaaaatagcaataccgcctaaccaagcgaatcgttttctcttattgatatcgcctttcgacagtactgcgaccaaaatttccagcattgaaaaagcagatgtcaatgcagcaaataaaaatagaagtaaaaatgctaataaaaagataattccgaacggcatttgattaaacacagtcggcagaacgttaaataacagaaccgggccttggtctggcttgaggccgaatgaaaatacagctggaaaaatcgcaattccggccattacagcaacaagcatgttcataacagttacagatacagcggactgtaccagattttcctgtttctctaaataagcgctatacgttaccatgacagatacaccgacacttaataagaaaaaggattgtcccattgcatataaaatggtattggcatcaattgcagttaaatcaggcatgaggaaaaatttgattccttccatcgcgccatcaagtgtaaccgaacgcaccattaaaatgatgaataatagaaaaagcgccggcattaatacttggcttgctttttcaattccgctgcttaccccttttgcaacaactaaaattgttaccaccataaagagcagctggcctcctacagccaaataaggatttgaaatggtacttgcaaatatcgtatcaaaaccagatgtttgcgataaaccgccagtgaagccttttataatataaattaaaatccatccgcctacgacactgtagaaagatagaagaataaagcacgtcaccatgcctaaataaccgatccaatgccacttcgttcctggagcaagtgttttataggactgaacggcatctttctgtgttcttctgcctatgatgaattcacctaacaataaaggcagtccgattaaaaccgtaaataaaataaaaataagtaaaaatgcgcctcctccgctggttccggcaacatatgggaatttccatatcgcaccaagcccgatagctgatcctgccgcggctaaaataaagccgagcttcgaagaccattgatttgcttccttcaccgtatcactcctatttgatctaaccattataaaggttcattgtaagaatatcttcctatatagtcaagaacattttaattagtttacatcatatatctatagacatctgccaaaaactaatattgaattattcagaaaattatttataataagagaatgttatgaaatttgtaagaatttctgctgaagttcttgataagtgtgttaggagtgtttttatggacatcattagaaaaataagccattttgcaggacaaacctttggcatatgggtcattgtttttgcagtgctgggattttctttcccatctttatttacgtggatcagttcttatattacgatttttctcggcattatcatgtttgggatgggccttacactgcaagccgatgatttcaaagagctggtcagaaagccttggcaagttattattggagtaatagctcagtatacgatcatgccgctcgttgctttcggcctcgcatttgggcttcatcttccagctgaaatcgcagttggtgttattcttgtcggctgctgtcccgggggaactgcatctaatgttatgacattcttagcaaaaggaaatactgccctttctgttgcggttacgacaatttctaccttattggcacctgttgtaacaccgttgttgattatgctgtttgccaaagaatggcttcctgtctcgccggggtctttgtttatctcaatcttacaggcggttttatttccgatcattgcaggtctgattgtcaaaatgtttttcagaaaacaagtggcaaaagccgtacatgcccttccgcttgtttctgtcattggcatcgttgcgattgtctcagctgtcgtcagcggcaatcgggaaaatctgcttcaatcggggttgctcattttttcagttgttatcctgcataacggtatcggttatttactggggtttctttgtgcaaagcttttaaaaatggattacccgtctcaaaaagcgattgcaatcgaagtcggcatgcaaaactccgggcttggggctgcacttgccacggctcatttctcaccgctatctgccgtaccaagcgcaatattcagtgtgtggcataacctttcaggttctatgcttgcaacatattggtcaaaaaaagtgaaaaagaagcaagctggatccaaaagcagcaatctatcactttaaatatgcatcaaaaagggtacatcactttatcgtgatgtacccttttttattatccttctaataaaagctgttcaggatcttccagtaaatttttgattgtcacgaggaaaccaaccgcttctttaccgtctacaattcggtgatcataagataaagcgatatacatcatcggacggttttcgaaacgctcttcatcaatggctacagggcgcagctgaatcttatgcatgcccagtataccgacttgcgggctgtttaaaattggagttgacatcaatgaaccgaaagtccctccgtttgtaatcgtgaaggagcc

(The sequence listing continues in the following parts.)
